(19) United States
(12) Patent Application Publication
(10) Pub. No.: US 2025/0290140 A1
(43) Pub. Date: Sep. 18, 2025

(54) TRANSCRIPTOMIC PROFILING

(71) Applicant: The Trustees of Columbia University in the City of New York, New York, NY (US)

(72) Inventors: Harris Wang, New York, NY (US); Yiming Huang, New York, NY (US)

(21) Appl. No.: 18/859,801

(22) PCT Filed: Apr. 28, 2023
(86) PCT No.: PCT/US23/66386

§ 371 Date: Oct. 24, 2024

Related U.S. Application Data
(60) Provisional application No. 63/336,697, filed on Apr. 29, 2022.

(51) Int. Cl. C12Q 1/6883; C12Q 1/6886; C12Q 1/689

(52) U.S. Cl. CPC C12Q 1/6883; C12Q 1/6886; C12Q 1/689; C12Q 2600/118; C12Q 2600/158

(57) ABSTRACT

The present disclosure relates to methods and systems for transcriptomic profiling of a biological sample and use of the transcriptomic profile for disease monitoring, responses to perturbations, and personalized therapies. In particular, the disclosure is related to methods and systems for transcriptomic profiling from host cells (e.g., small and large intestine exfoliated cells) in feces.

### CROSS-REFERENCE TO RELATED APPLICATIONS

[0001] This application claims the benefit of U.S. Provisional Application No. 63/336,697, filed Apr. 29, 2022, the content of which is herein incorporated by reference in its entirety.

### STATEMENT REGARDING FEDERALLY—SPONSORED RESEARCH OR DEVELOPMENT

[0002] This invention was made with government support under AI132403 and DK118044 awarded by the National Institutes of Health and HR00111920009 awarded by U.S. Department of Defense/DARPA. The government has certain rights in the invention.

### SEQUENCE LISTING

[0003] The contents of the electronic sequence listing titled “COLUM-40850.601.xml” (Size: 1,982,275 bytes; and Date of Creation: Apr. 28, 2023) is herein incorporated by reference in its entirety.

### TECHNICAL FIELD

[0004] The present disclosure relates to methods and systems for transcriptomic profiling of a biological sample and use of the transcriptomic profile for disease monitoring, responses to perturbations, and personalized therapies. In particular, the disclosure is related to methods and systems for transcriptomic profiling from host cells (e.g., small and large intestine exfoliated cells) in feces.

### BACKGROUND

[0005] Inflammatory Bowel Disease (IBD) is a broad term that describes conditions characterized by chronic inflammation of the gastrointestinal tract. The two most common inflammatory bowel diseases are Crohn's disease and ulcerative colitis. IBD is a chronic condition with symptoms that tend to wax and wane with frequent exacerbations. Adequate monitoring is crucial for identifying disease relapse and administering timely treatments. Besides IBD, other chronic colon diseases, such as irritable bowel syndrome, similarly require long-term monitoring and management. Current gut disease management approaches include colonoscopy, stool clinical marker tests, blood tests, and a data-driven IBD tracker. Colonoscopy is the gold standard in monitoring approaches but lacks temporal resolution and is invasive and expensive. Stool clinical marker tests and blood tests are non-invasive but suffer from low resolution or insufficient information for correlation to disease states, respectively. Data-driven IBD trackers are convenient but the data is limited to existing databases due to insufficient information. Thus, non-invasive, cost-effective, and reliable methods and systems are needed to manage chronic diseases.

### SUMMARY

[0006] Provided herein are methods and systems for transcriptomic profiling of a biological sample. In some embodiments, the biological sample is a fecal sample. The methods combine amplification (e.g., PCR amplification) of genes of interest with high-throughput sequencing read-outs.

[0007] In some embodiments, the methods comprise amplifying one or more target RNA sequences from a sample comprising RNA extracted from a fecal sample from a subject to produce amplicons; and sequencing the amplicons. In some embodiments, the amplicons are single stranded, double stranded, or a combination thereof. In some embodiments, the amplicons are less than about 500 bases in length.

[0008] In some embodiments, the RNA extracted from the fecal sample comprises RNA derived from subject cells and RNA derived from gut bacteria. In some embodiments, the one or more target RNA sequences are derived from one or more subject genes. In some embodiments, the one or more subject genes comprise a housekeeping gene, a tissue-specific gene, a cell type-specific gene, a disease related gene, a cell-signaling gene, or combinations thereof. In some embodiments, the methods further comprise determining gene expression for the one or more subject genes.

[0009] In some embodiments, the one or more target RNA sequences are about 300 to about 400 nucleotides in length.

[0010] In some embodiments, the amplicons are greater than about 150 bases in length. In some embodiments, the amplicons are about 350 to about 500 bases in length.

[0011] In some embodiments, the methods further comprise purifying the amplicon based on size prior to sequencing.

[0012] In some embodiments, the amplifying comprises contacting the sample with a reverse transcriptase and random hexamer primers under conditions for DNA synthesis to form an cDNA mixture and contacting the cDNA mixture with a DNA polymerase and a pair of oligonucleotide primers configured to specifically amplify each of the one or more target sequences under conditions for amplicon production.

[0013] In some embodiments, amplicon production comprises limited cycle PCR amplification. In some embodiments, the limited cycle PCR amplification comprises 5 to 20 amplification cycles.

[0014] In some embodiments, the oligonucleotide primers are 20-30 nucleotides in length. In some embodiments, the oligonucleotide primers have a melting temperature of about 62° C. to about 68° C.

[0015] In some embodiments, each of the oligonucleotide primers comprises an amplicon identifier sequence. In some embodiments, each amplicon comprises two amplicon identifier sequences flanking a target sequence.

[0016] In some embodiments, the amplifying further comprises removing residual RNA from the cDNA mixture. In some embodiments, the methods further comprise removing single stranded nucleic acid impurities from the amplicons.

[0017] In some embodiments, the sample further comprises an external RNA control. In some embodiments, the methods further comprise amplifying and sequencing control sequences derived from the external RNA control.

[0018] In some embodiments, the methods further comprise profiling the gut microbiome.

[0019] In some embodiments, the subject is human. In some embodiments, the subject has or is suspected of having a disease or disorder. In some embodiments, the disease or disorder is a gastrointestinal disease or disorder. In some embodiments, the gastrointestinal disease or disorder is selected from irritable bowel syndrome (IBS), inflammatory bowel diseases (IBD), Crohn's disease (CD), Celiac's disease (CeD), and ulcerative colitis (UC).

[0020] Also provided herein are methods for diagnosing a disease or disorder in a subject. The methods comprise generating a transcriptome profile of subject cells in a fecal sample from the subject by a method disclosed herein and comparing the transcriptome profile to a healthy control to determine whether the individual has or has an increased likelihood of having the disease or disorder.

[0021] Further provided are methods for monitoring the progression or regression of a disease or disorder in a subject. The comprise acquiring two or more fecal samples from the subject, wherein the two or more fecal samples are separated by a period of time, generating a transcriptome profile of subject cells in the two or more fecal samples by a method disclosed herein, and determining changes in the transcriptome profile between any of the fecal samples. In some embodiments, the methods comprise associating changes in the transcriptome profile with progression or regression of the disease or disorder.

[0022] In some embodiments, the disease or disorder is a gastrointestinal disease or disorder. In some embodiments, the gastrointestinal disease or disorder is selected from irritable bowel syndrome (IBS), inflammatory bowel diseases (IBD), Crohn's disease (CD), Celiac's disease (CeD), ulcerative colitis (UC), and colon cancer.

[0023] Also provided are methods for evaluating gut health in a subject. In some embodiments, the methods comprise generating a transcriptome profile of subject cells in a first fecal sample from the subject by a method disclosed herein; and comparing the transcriptome profile of the first fecal sample to one or more controls to determine measure of overall gut health.

[0024] The methods may further comprise acquiring one or more additional fecal samples from the subject, wherein the one or more additional fecal samples are separated from the first fecal sample or each other by a period of time and generating a transcriptome profile of the one or more additional fecal samples. In some embodiments, the methods comprise identifying changes in the transcriptome profile between any of the fecal samples; and associating changes in the transcriptome profile with changes in gut health.

[0025] In some embodiments, the methods comprise generating a transcriptome profile of subject cells in one or more fecal samples from the subject by a method disclosed herein; and comparing the transcriptome profile of the one or more fecal samples to one or more controls to determine measure of overall gut health. In some embodiments, the methods further comprise identifying changes in the transcriptome profile between any of the one or more fecal samples; and associating changes in the transcriptome profile with changes in gut health. In some embodiments, the methods further comprise providing an assessment of gut health.

[0026] In some embodiments, the subject is a healthy subject. In some embodiments, the subject is not suffering from a gastrointestinal disease or disorder.

[0027] The methods may further comprise signal decomposition to determine the heterogeneity and distribution of specific cell types.

[0028] The transcriptomic profiling from small and large intestine exfoliated cells from the fecal sample allows a non-invasive means to prove the transcriptome of the intestines and characterize and diagnose disorders of the gut, including for example, inflammatory bowel disease (IBD) and colitis and chronic diseases, such as, metabolic conditions, and neurological, cardiovascular, and respiratory illnesses, which are associated with changes in gut cells.

[0029] The transcriptomic profiling may include any or all of: 16 housekeeping genes (e.g., Gapdh, Gnai3, Dazap2, Tfe3, Sdhd, Trappc 10, Rtca, Dlat, Xpo6, Ndufa9, Ddt, Gpr107, Narf, Tbrg4, Brat1), 50 tissue-specific genes (e.g., from large intestine, small intestine, and brain), 63 cell-type marker genes identified from mice gut single-cell RNA-seq, 126 IBD- and colitis-related genes, and 102 genes identified from colon/cecum RNA-seq.

[0030] Other aspects and embodiments of the disclosure will be apparent in light of the following detailed description.

### BRIEF DESCRIPTION OF THE DRAWINGS

[0031] FIG. 1 is a schematic of an exemplary exfoliome sequencing method by multiplex PCR based amplicon generation (Exfo-seq).

[0032] FIG. 2 is schematic of an exemplary workflow of an amplicon-based exfoliome sequence method. The multiplex PCR reaction setup consists of three key parts (1) primer design for gene targets amplification; (2) multiplex PCR reaction parameters (3) unused primers and undesired product removal. Additionally, a “unique amplicon identifier” (UAI) is introduced on amplification primers to eliminate all bias on amplicon quantification in downstream Illumina library preparation and sequencing. For a given set of genes of interest, criteria used for primers design, parameters involved in multiplex PCR reaction, as well as steps/procedures utilized to remove undesired material and purify gene amplicons are outlined. The resulting gene amplicons are subjected to Illumina library preparation and sequencing for exfoliome RNA profiling.

[0033] FIG. 3 shows Exfo-seq can robustly capture gene signals with limited input amounts. Purified human RNA was mixed with E. coli RNA at different ratios and profiled with Exfo-seq. Initial primer sets for the spike-in experiment include 34 amplicon targets on 19 randomly selected genes. Remarkably, host RNA as low as 0.01 ng (0.01% of total RNA) could be robustly amplified and sequenced. Based on a theoretical calculation of amount of RNA extractable from stool, this result suggested that Exfo-seq can be applied on mouse and human stool samples.

[0034] FIG. 4 shows the technical and biological reproducibility of Exfo-seq. Exfoliome RNA sequencing was performed twice on individual stool samples (bottom left panel) or samples collected from different mice housed together in the same cage (bottom right panel).

[0035] FIG. 5 shows that exfoliome gene expression captured by Exfo-seq is consistent with input and colon tissue as determined by existing standard methods. Exfoliome RNA sequencing on stool samples with external RNA control (ERCC) as spike-in control was compared the quantification of ERCC based on the input concentration (left panel). Exfoliome RNA sequencing on stool samples of mouse fecal RNA abundance was compared to the colon tissue gene expression by conventional RNA-seq (right panel).

[0036] FIG. 6 shows Exfo-seq captures gene expression of gut cells from large intestine. Fecal gene expression quantified Exfo-seq was compared to gene expression in different mouse tissues along the gastrointestinal tract determined by conventional RNA-seq. Exfoliome RNA predominantly represented large intestine signals while some small intestine signals were also observed.

[0037] FIGS. 7A-7C show Exfo-seq captured increased cell exfoliation and inflammation trajectory in mouse DSS-induced colitis model. FIG. 7A is a schematic of the experimental design using a DSS induced mouse colitis model. FIG. 7B is a graph of the increase of cell/RNA exfoliation for mouse with colitis. FIG. 7C is a graph showing detection of development trajectory of DSS-induced colitis.

[0038] FIGS. 8A-8C show Exfo-seq captured temporal differential gene expression in mouse DSS-induced colitis model. Analysis of the RNA exfoliome data from the DSS-induced mouse colitis model showed longitudinal differential gene expression of mouse gastrointestinal tract (FIG. 8A) enabling identification of early-responding biomarkers (FIG. 8B). Further analysis of these differentially expressed genes showed their longitudinal expression (FIG. 8C) in DSS-induced colitis model.

[0039] FIGS. 9A and 9B show Exfo-seq captured kinetics of cell type changes by signal decomposition in mouse DSS-induced colitis model. Using a previously established computation frameworks with RNA data generated by Exfo-seq, the cell-type composition of exfoliated cells RNA was determined (FIG. 9A). FIG. 9B shows the analysis used on exfoliome data from the DSS-induced mouse colitis model which identified longitudinal cell-type composition changes, e.g., expansion of specific immune cell types.

[0040] FIGS. 10A-10C show Exfo-seq captured temporal dynamics of mouse gut cell gene expression in a non-perturbated mouse model. FIG. 10A a schematic of the experimental design to apply Exfo-seq to an un-perturbed mouse model to monitor gut gene expression fluctuation for 6 weeks. FIGS. 10B and 10C show that housekeeping genes generally fluctuated less in comparison to inflammation-related genes.

[0041] FIGS. 11A-11C show combining Exfo-seq and rRNA 16S-seq captured temporal host-microbe interaction in a non-perturbated mouse model. Exfoliome RNA data was combined with gut microbiota profiling by conventional 16S rRNA sequencing in the un-perturbed mouse model. FIG. 11A shows the global shift in the gut microbiota profile over time, which may explain the variation of some host gene expression seen in FIG. 10. FIGS. 11B and 11C show correlation and links between microbiota species and gene expression of gastrointestinal.

[0042] FIG. 12 is graphs showing that Exfo-seq demonstrates higher sensitivity in quantifying biomarkers. Exfo-seq exfoliome RNA quantification from a C. rodentium infection mouse mild colitis model (right) was compared to an ELISA assay (left) on a well-known inflammation biomarker Len2 to quantify its protein level (Lipocalin) in stool with a commercial kit.

[0043] FIG. 13 shows Exfo-seq robustly quantified exfoliome of human stool sample collected 5 years ago with high technical reproducibility.

[0044] FIG. 14 shows Exfo-seq captured temporal exfoliome fluctuations within individuals and variations between individuals in a healthy cohort. Exfoliome RNA sequencing on human stool samples from either the same healthy donors at different time points or different healthy donors identified the temporal gut gene expression fluctuation within individuals and variation between individuals.

[0045] FIG. 15 shows Exfo-seq separated IBS patients from healthy individuals and identified IBS gene signatures. Stool exfoliome RNA sequencing was performed on samples collected from active IBS patients and their exfoliome profile was compared to samples from healthy individuals. Exfoliome RNA of IBS patients were distinct from healthy individuals, and analysis of detailed gene-level differences identified a set of genes that were highly expressed in active IBS patients, which could imply disease etiologies or be used as biomarkers for IBS.

### DETAILED DESCRIPTION

[0046] The disclosed systems, compositions, and methods advance methods transcriptomic profiling of a biological sample, particularly fecal samples.

[0047] Greater than twenty percent of gut epithelial cells are shed each day according to previous reports. These cells and their nucleic acids material (e.g., exfoliome RNA) can be found in stool and since they originated from the gastrointestinal tract are ideal material to use for gathering information of overall gut health. However, extremely low signals are captured by existing methods due to extremely low amounts and quality of host cells in fecal samples and high contamination from microbial sources. Additionally, the rapid degradation of RNA results in poor quantity of RNA of a quality suitable for use. The majority (greater than 99%) of cells in fecal matter are due to the trillions of gut microbes that reside in the gastrointestinal tract. Thus, although there are exfoliated host cells and host nucleic acids in stool, it is challenging to capture these signals and quantify them. Previous attempts to profile these exfoliated nucleic acids using standard ploy-A capture method generate a very low ratio of usable signals, which is not sufficient for robust quantification.

[0048] Disclosed herein are methods for transcriptomic profiling with improved efficiency, accuracy, and consistency over existing methods. The disclosed methods overcome limitations of RNA fragility, low input RNA concentration, and high background contamination commonly associated with complex samples, such as fecal samples. In some embodiments, the methods include multiplex PCR to amplify gene signals of interests combined with next-generation sequencing (NGS). The disclosed methods can capture gene signatures from 0.01 ng of human RNA (less than 20 cells or 0.01% of total RNA) with high contamination (>99.99%). The disclosed methods further facilitate monitoring and management of chronic diseases, such as gastrointestinal diseases and disorders, in a non-invasive, convenient, sensitive, and cost-effective way. Furthermore, the disclosed methods can be designed to probe for specific gene signatures for evaluating patient health and optimizing therapy.

[0049] Section headings as used in this section and the entire disclosure herein are merely for organizational purposes and are not intended to be limiting.

### Definitions

[0050] The terms “comprise(s),” “include(s),” “having,” “has,” “can,” “contain(s),” and variants thereof, as used herein, are intended to be open-ended transitional phrases, terms, or words that do not preclude the possibility of additional acts or structures. As used herein, comprising a certain sequence or a certain SEQ ID NO usually implies that at least one copy of said sequence is present in recited peptide or polynucleotide. However, two or more copies are also contemplated. The singular forms “a,” “and” and “the” include plural references unless the context clearly dictates otherwise. The present disclosure also contemplates other embodiments “comprising,” “consisting of,” and “consisting essentially of,” the embodiments or elements presented herein, whether explicitly set forth or not.

[0051] For the recitation of numeric ranges herein, each intervening number there between with the same degree of precision is explicitly contemplated. For example, for the range of 6-9, the numbers 7 and 8 are contemplated in addition to 6 and 9, and for the range 6.0-7.0, the number 6.0, 6.1, 6.2, 6.3, 6.4, 6.5, 6.6, 6.7, 6.8, 6.9, and 7.0 are explicitly contemplated.

[0052] Unless otherwise defined herein, scientific, and technical terms used in connection with the present disclosure shall have the meanings that are commonly understood by those of ordinary skill in the art. The meaning and scope of the terms should be clear; in the event, however of any latent ambiguity, definitions provided herein take precedent over any dictionary or extrinsic definition. Further, unless otherwise required by context, singular terms shall include pluralities and plural terms shall include the singular.

[0053] The term “amplifying” or “amplification” in the context of nucleic acids refers to the production of multiple copies of a polynucleotide, or a portion of the polynucleotide, typically starting from a small amount of the polynucleotide (e.g., a single polynucleotide molecule), where the amplification products or amplicons are generally detectable. Amplification of polynucleotides encompasses a variety of chemical and enzymatic processes. The generation of multiple DNA copies from one or a few copies of a target or template DNA molecule, for example, as in polymerase chain reaction (PCR).

[0054] The term “amplicon” or “amplified product” refers to a segment of nucleic acid, generally DNA, generated by an amplification process such as the PCR process.

[0055] The term “gene” refers to a nucleic acid (e.g., DNA or RNA) sequence that comprises coding sequences necessary for the production of an RNA, or of a polypeptide or its precursor. A functional polypeptide can be encoded by a full-length coding sequence or by any portion of the coding sequence as long as the desired activity or functional properties (e.g., enzymatic activity, ligand binding, signal transduction, etc.) of the polypeptide are retained. The term “gene” also encompasses the coding regions of a structural gene and includes sequences located adjacent to the coding region on both the 5′ and 3′ ends, e.g., for a distance of about 1 kb on either end, such that the gene corresponds to the length of the full-length mRNA (e.g., comprising coding, regulatory, structural, and other sequences). The sequences that are located in the S′ of the coding regions and that are present on the mRNA are referred to as 5′ non-translated or untranslated sequences. The sequences that are located 3′ or downstream of the coding region and that are present on the mRNA are referred to as 3′ non-translated or 3′ untranslated sequences.

[0056] The terms “primer,” “primer sequence,” “primer oligonucleotide,” and “amplification oligonucleotide” as used herein, refer to an oligonucleotide, whether naturally occurring or synthetic, which is capable of acting as a point of initiation of synthesis of an extension product that is a complementary strand of nucleic acid (all types of DNA or RNA) when placed under suitable amplification conditions (e.g., buffer, salt, temperature and pH) in the presence of nucleotides and an agent for nucleic acid polymerization (e.g., a DNA-dependent or RNA-dependent polymerase). The primers of the present disclosure can be of any suitable size, and desirably comprise, consist essentially of, or consist of about 15 to 50 nucleotides.

[0057] As used herein, the terms “primer set,” “set,” or “set of primers” refer to two or more oligonucleotides which together are capable of priming the amplification of a target sequence. In certain embodiments, the term “primer set” refers to a pair of oligonucleotides including a first oligonucleotide that hybridizes with the 5′-end of the target sequence or target nucleic acid to be amplified and a second oligonucleotide that hybridizes with the complement of the target sequence or target nucleic acid to be amplified at the 3′ end.

[0058] The primers may be modified in any suitable manner so as to stabilize or enhance the binding affinity of the oligonucleotide for its target. For example, an oligonucleotide sequence as described herein may comprise one or more modified oligonucleotide. Modified nucleotides are nucleotides or nucleotide triphosphates that differ in composition and/or structure from natural nucleotides and nucleotide triphosphates. Modifications include those naturally occurring that result from modification by enzymes that modify nucleotides, such as methyltransferases. Modified nucleotides also include synthetic or non-naturally occurring nucleotides. For example, modified nucleotides include those with 2′ modifications, such as 2′-O-methyl and 2′-fluoro. Other 2′-modified nucleotides are known in the art and are described in, for example U.S. Pat. No. 9,096,897, which is incorporated herein by reference in its entirety. Modified nucleotides or nucleotide triphosphates used herein may, for example, be modified in such a way that, when the modifications are present on one strand of a double-stranded nucleic acid where there is a restriction endonuclease recognition site, the modified nucleotide or nucleotide triphosphates protect the modified strand against cleavage by restriction enzymes.

[0059] The terms “target sequence” and “target nucleic acid (e.g., RNA) sequence” are used interchangeably herein and refer to a specific nucleic acid sequence, the presence, absence, or level of which is to be analyzed by the disclosed method. In the context of the present disclosure, a target sequence preferably includes a nucleic acid sequence to which one or more oligonucleotides will hybridize and from which amplification will initiate.

[0060] A “subject” or “patient” may be human or non-human and may include, for example, animal strains or species used as “model systems” for research purposes, such a mouse model as described herein. Likewise, patient may include either adults or juveniles (e.g., children). Moreover, patient may mean any living organism, preferably a mammal (e.g., human or non-human). Examples of mammals include, but are not limited to, any member of the Mammalian class: humans, non-human primates such as chimpanzees, and other apes and monkey species; farm animals such as cattle, horses, sheep, goats, swine; domestic animals such as rabbits, dogs, and cats; laboratory animals including rodents, such as rats, mice and guinea pigs, and the like. In one embodiment of the methods provided herein, the subject is a human.

[0061] The term “contacting” as used herein refers to bring or put in contact, to be in or come into contact. The term “contact” as used herein refers to a state or condition of touching or of immediate or local proximity.

[0062] Preferred methods and materials are described below, although methods and materials similar or equivalent to those described herein can be used in practice or testing of the present disclosure. All publications, patent applications, patents and other references mentioned herein are incorporated by reference in their entirety. The materials, methods, and examples disclosed herein are illustrative only and not intended to be limiting.

### Transcriptomic Profiling

[0063] In a broad sense, transcriptomic profiling is analysis of a set of RNA molecules expressed in some given sample, such as a particular cell or group of cells, tissues, organism. Transcriptome profiling is currently performed using hybridization or sequencing-based methodologies. However, when used with complex samples, samples which have low RNA amounts, or samples which have large amounts of contaminating nucleic acids, particularly from other RNA sources, these current methods suffer from limitations such as low resolution, quantification, specificity, and/or sensitivity. The methods disclosed herein overcome those limitations, particularly for fecal samples, with increased scalability (e.g., monitor hundreds to thousands of genes in a single reaction) and lower cost.

[0064] In some embodiments, the methods comprise amplifying one or more target RNA sequences from a sample comprising RNA extracted from a subject fecal sample to produce amplicons of less than about 500 bases in length and sequencing the amplicons.

[0065] In some embodiments, the fecal samples are freshly collected samples. Additionally, under certain conditions, fresh fecal samples are not analyzed immediately and are instantly frozen at −80° C. to maintain integrity. However, the fecal samples do not have to be freshly collected. Thus, samples collected 1, 2, 3, 4, 5, 6 or more years ago may be employed. The historical samples may have been frozen, at a suitable temperature, such as −80° C. for example, for storage. Lyophilized fecal samples may also be suitable for use with the disclosed methods. The sample may be frozen with or without the addition of stabilizing agents. When ready for use, frozen or lyophilized samples may be thawed in the presence or absence of additional stabilizing agents (e.g., a stabilization buffer).

[0066] In general, stabilizing agents, for example as in a stabilizing buffer, are those chemical agents which maintain an appropriate pH, as well as the use of chelating agents to prevent the phenomenon of metal redox cycling or the binding of metal ions to the phosphate backbone of nucleic acids. The term “chelator” or “chelating agent” as used herein will be understood to mean a chemical that will form a soluble, stable complex with certain metal ions (e.g., Ca²⁺ and Mg²⁺), sequestering the ions so that they cannot normally react with other components, such as deoxyribonucleases (DNase) or endonucleases (e.g. type I, II and III restriction endonucleases) and exonucleases (e.g. 3′ to 5′ exonuclease), enzymes which are abundant in the GI tract.

[0067] Only a portion of the collected fecal sample may need to be employed in the methods of the invention to achieve reliable results. A fecal sample of less than 1 gram may allow multiple rounds of the methods disclosed herein. Thus, reliable results may utilize less than 1 gram total of a fecal sample. In some embodiments, the fecal sample employed in the methods disclosed herein is less than about 1 g, less than about 0.75 g, less than 0.5 g, less than 0.25 g, less than 0.1 g, less than 0.05 g, or less.

[0068] The fecal sample may be processed in an appropriate volume of homogenization buffer to facilitate RNA extraction. Homogenization of stool can be performed manually, or through the use of additional mechanical agitation methods. In some embodiments, the homogenization is performed using beads.

[0069] In some embodiments, the processing comprises filtering the fecal sample. For example, the fecal sample may be subjected to conditions sufficient to filter the sample using gravitational filtration, centrifugal filtration, filter stacking, sedimentation, passive filtering, or filtration using a mesh, membrane, or other filtration mechanism. A filter may comprise a membrane, beads, diaphragms, colloids, weir filters, pillar filters, cross-flow filters, solvent filters, sieves, or any other filter.

[0070] In some embodiments, the processing comprises lysis of one or more cells or cell types in the fecal sample. In some embodiments, the lysis is performed using one or more members selected from the group consisting of ultrasonic lysis, mechanical lysis, biological lysis, and chemical lysis. In some embodiments, the lysis is accomplished by the same buffer as used in the homogenization or RNA extraction.

[0071] RNA can be extracted and purified using any suitable technique. For example, in some embodiments, RNA can be extracted using TRIzol (Invitrogen, Carlsbad, Calif.) and purified using a variety of RNA preparation kits. RNA can be further purified using DNase treatment to eliminate any contaminating DNA and to eliminate contaminants that interfere with cDNA synthesis (e.g., by precipitation). RNA integrity can be evaluated by running electropherograms, and an RNA integrity number (RIN, a correlative measure that indicates intactness of mRNA) can be determined, if desired. Following RNA extraction, the resulting RNA concentrations can be determined using any suitable method.

[0072] A transcriptome profile may refer to all RNA molecules in a cell (including mRNA, rRNA, tRNA and other non-coding RNA products) or a subset of RNA molecules in a cell, such as mRNA molecules. Accordingly, the sample may comprise any or all of the types of RNA molecules, e.g., mRNA, rRNA, tRNA and other non-coding RNA products, or a subset thereof. The RNA used in the methods herein is derived from a fecal sample, thus the extracted RNA includes RNA derived from subject cells found in the fecal sample (e.g., cells exfoliated from various locations all the GI tract or elsewhere in the body) and/or RNA derived from gut bacteria cells.

[0073] In some embodiments, the one or more target RNA sequences are derived from one or more subject, or host, genes. Thus, the methods amplify RNA derived from subject cells found in the fecal sample. In some embodiments, the methods profile the RNA from cells exfoliated from various locations in the GI tract, referred to herein as exfoliome RNA. The one or more genes may include, but are not limited to, housekeeping genes, tissue-specific genes, cell type-specific genes, disease-related genes, and/or cell-signaling genes.

[0074] In some instances, the one or more target RNA sequences comprises one or more target sequences from genes listed in Tables 1 and 2. In some instances, the one or more target RNA sequences comprises at least about 2, at least about 3, at least about 4, at least about 5, at least about 6, at least about 7, at least about 8, at least about 9, at least about 10, at least about 15, at least about 20, at least about 25, at least about 30, at least about 35, at least about 40, at least about 45, or at least about 50 targets. In some instances, the one or more target RNA sequences comprises at least about 2, at least about 3, at least about 4, at least about 5, at least about 6, at least about 7, at least about 8, at least about 9, at least about 10, at least about 15, at least about 20, at least about 25, at least about 30, at least about 35, at least about 40, at least about 45, or at least about 50 targets from those listed in Tables 1 and 2.

[0075] The extracted RNA is reverse transcribed into cDNA using suitable primers. The primers can comprise a portion complementary to a region of the target sequence and/or can comprise non-specific sequences for reverse transcription of the whole transcriptome or a portion thereof. In some embodiments, the primers comprise a portion complementary to a region of the target RNA, such as in a constant region of the target or to a poly-A tail of the mRNA. In some embodiments, the primers include sequence specific, polydT, and/or random hexamer primers. In select embodiments, the primers include random hexamer primers.

[0076] In some embodiments, the extracted RNA can be non-specifically transcribed into cDNA which is followed by specific amplification of the target sequences using a DNA polymerase. In some embodiments, the amplification reaction including contacting the sample with a reverse transcriptase and random hexamer primers under conditions for DNA synthesis and then contacting the resulting cDNA with a DNA polymerase and a pair of oligonucleotide primers specific for each of the one or more target sequences under conditions for amplicon production.

[0077] Any enzyme having polymerase activity can be used in the amplification, including DNA polymerases, RNA polymerases, reverse transcriptases, enzymes having more than one type of polymerase or enzyme activity. The enzyme can be thermolabile or thermostable. Mixtures of enzymes can also be used. Exemplary enzymes include: DNA polymerases such as DNA Polymerase I (“Pol I”), the Klenow fragment of Pol I, T4, T7, Sequenase® T7, Sequenase® Version 2.0 T7, Tub, Taq, Tth, Pfic, Pfu, Tsp, Tfl, Tli and Pyrococcus sp GB-D DNA polymerases; RNA polymerases such as E. coli, SP6, T3 and T7 RNA polymerases; and reverse transcriptases such as AMV, M-MuLV, MMLV, RNAse H MMLV (SuperScript® family of enzymes), ThermoScript® family of enzymes, HIV-1, and RAV2 reverse transcriptases.

[0078] “Conditions for DNA synthesis” and “conditions for amplicon production,” as used herein, refers to conditions that promote annealing and/or extension of the primers. Such conditions are well-known in the art and depend on the amplification method selected. Amplification conditions encompass all reaction conditions including, but not limited to, temperature and/or temperature cycling, buffer, salt, ionic strength, pH, and the like.

[0079] Amplification (e.g., amplicon production and cDNA synthesis) can be performed using any suitable nucleic acid sequence amplification method. In some embodiments, the amplification includes, but is not limited to, polymerase chain reaction (PCR), reverse-transcriptase PCR (RT-PCR), real-time PCR, transcription-mediated amplification (TMA), rolling circle amplification, nucleic acid sequence-based amplification (NASBA), strand displacement amplification (SDA), Transcription-Mediated Amplification (TMA), Single Primer Isothermal Amplification (SPIA), Helicase-dependent amplification (HDA), Loop mediated amplification (LAMP), Recombinase-Polymerase Amplification (RPA), and ligase chain reaction (LCR). In some embodiments, the cDNA synthesis and/or amplicon production includes polymerase chain reaction (PCR).

[0080] In some embodiments, cDNA generation and/or amplicon production uses limited cycle PCR, for example about 5 to about 25 cycles. Limited cycle PCR amplification is PCR amplification in which the reaction is stopped while in exponential phase such that the target sequence is amplified in a quantitative manner. In some embodiments, amplicon production uses about 10 to about 20 (e.g., 10, 11, 12, 13, 14, 15, 16, 17, 18, 19 or 20) cycles of PCR.

[0081] Primers based on the nucleotide sequences of target sequences can be designed for use in amplification of the target sequences. The exact composition of the primer sequences is not critical to the invention, but for most applications the primers hybridize to specific sequences of under stringent conditions, particularly under conditions of high stringency. The primers for a PCR reaction are designed to hybridize to regions in their corresponding template to produce an amplifiable segment. In some embodiments, the primers have a region of hybridization with the target of about 20 to about 30 (e.g., 20, 21, 22, 23, 24, 25, 26, 27, 28, 29, or 30) nucleotides in length.

[0082] Different primer pairs can anneal and melt at about the same temperatures (e.g., within 1, 2, 3, 4, 5, 6, 7, 8, 9 or 10° C.). Preferably, the primers are chosen for a melting temperature of about 60° C. to about 60° C. In some embodiments, the primers have a melting temperature of about 62° C. to about 68° C. (e.g., about 62, about 63, about 64, about 65, about 66, about 67, or about 68° C.).

[0083] Primers can be designed according to known parameters for avoiding secondary structures and self-hybridization. Algorithms for the selection of primer sequences are generally known, and are available in commercial software packages.

[0084] The primers may further comprise an amplicon identifier. An amplicon identifier may include a specific series of nucleotides which do not anneal with the target may be included in each primer sequence, resulting in amplicons which include the target sequence flanked by 5′ and 3′ sequences comprising an amplicon identifier. In some embodiments, the amplicon identifier comprises 4 or more (e.g., 4, 5, 6, 7, 8, 9, 10 or more) consecutive nucleotides of any sequence. As each primer may comprise an amplicon identifier the total resolving power of the identifier is the combination of the two amplicon identifiers. As shown in FIGS. 1 and 2, these unique amplicon identifiers or UAI flank the target sequence and provide a mechanism to eliminate any bias introduced by the library preparation and sequencing, and the addition of any adaptor sequences for using in the downstream sequencing or library preparation, as described below.

[0085] The pairs of primers are usually chosen to amplify target sequences of about 300 to about 400 bases in length. In some embodiments, the target sequences are about 300 to about 400 bases in length. The amplicons may be about 300 to about 400 bases, about 310 to about 400 bases, about 320 to about 400 bases, about 330 to about 400 bases, about 340 to about 400 bases, about 350 to about 400 bases, about 360 to about 400 bases, about 370 to about 400 bases, about 380 to about 400 bases, about 390 to about 400 bases, about 300 to about 390 bases, about 310 to about 390 bases, about 320 to about 390 bases, about 330 to about 390 bases, about 340 to about 390 bases, about 350 to about 390 bases, about 360 to about 390 bases, about 370 to about 390 bases, about 380 to about 390 bases, about 300 to about 380 bases, about 310 to about 380 bases, about 320 to about 380 bases, about 330 to about 380 bases, about 340 to about 380 bases, about 350 to about 380 bases, about 360 to about 380 bases, about 370 to about 380 bases, about 300 to about 370 bases, about 310 to about 370 bases, about 320 to about 370 bases, about 330 to about 370 bases, about 340 to about 370 bases, about 350 to about 370 bases, about 360 to about 370 bases, about 300 to about 360 bases, about 310 to about 360 bases, about 320 to about 360 bases, about 330 to about 360 bases, about 340 to about 360 bases, about 350 to about 360 bases, about 300 to about 350 bases, about 310 to about 350 bases, about 320 to about 350 bases, about 330 to about 350 bases, about 340 to about 350 bases, about 300 to about 340 bases, about 310 to about 340 bases, about 320 to about 340 bases, about 330 to about 340 bases, about 300 to about 330 bases, about 310 to about 330 bases, about 320 to about 330 bases, about 300 to about 320 bases, about 310 to about 320 bases, or about 300 to about 310 bases in length.

[0086] The pairs of primers are usually chosen so as to generate amplicons of at least about 150 bases/basepairs in length and less than about 500 bases/basepairs in length. The resulting amplicons may be double or single stranded.

[0087] In some embodiments, the amplicons are about 150 to about 500 bases/basepairs, about 150 to about 450 bases/basepairs, about 150 to about 400 bases/basepairs, about 150 to about 350 bases/basepairs, about 150 to about 300 bases/basepairs, about 150 to about 250 bases/basepairs, about 150 to about 200 bases/basepairs, about 200 to about 500 bases/basepairs, about 200 to about 450 bases/basepairs, about 200 to about 400 bases/basepairs, about 200 to about 350 bases/basepairs, about 200 to about 300 bases/basepairs, about 200 to about 250 bases/basepairs, about 250 to about 500 bases/basepairs, about 250 to about 450 bases/basepairs, about 250 to about 400 bases/basepairs, about 250 to about 350 bases/basepairs, about 250 to about 300 bases/basepairs, about 300 to about 500 bases/basepairs, about 300 to about 450 bases/basepairs, about 300 to about 400 bases/basepairs, about 300 to about 350 bases/basepairs, about 350 to about 500 bases/basepairs, about 350 to about 450 bases/basepairs, about 350 to about 400 bases/basepairs, about 400 to about 500 bases/basepairs, about 400 to about 450 bases/basepairs, or about 450 to about 500 bases/basepairs in length.

[0088] In select embodiments, the amplicons are about 350 to about 500 bases/basepairs in length. The amplicons may be about 350 to about 500 bases/basepairs, about 360 to about 500 bases/basepairs, about 370 to about 500 bases/basepairs, about 380 to about 500 bases/basepairs, about 390 to about 500 bases/basepairs, about 400 to about 500 bases/basepairs, about 410 to about 500 bases/basepairs, about 420 to about 500 bases/basepairs, about 430 to about 500 bases/basepairs, about 440 to about 500 bases/basepairs, about 450 to about 500 bases/basepairs, about 460 to about 500 bases/basepairs, about 470 to about 500 bases/basepairs, about 480 to about 500 bases/basepairs, about 490 to about 500 bases/basepairs, about 350 to about 490 bases/basepairs, about 360 to about 490 bases/basepairs, about 370 to about 490 bases/basepairs, about 380 to about 490 bases/basepairs, about 390 to about 490 bases/basepairs, about 400 to about 490 bases/basepairs, about 410 to about 490 bases/basepairs, about 420 to about 490 bases/basepairs, about 430 to about 490 bases/basepairs, about 440 to about 490 bases/basepairs, about 450 to about 490 bases/basepairs, about 460 to about 490 bases/basepairs, about 470 to about 490 bases/basepairs, about 480 to about 490 bases/basepairs, about 350 to about 480 bases/basepairs, about 360 to about 480 bases/basepairs, about 370 to about 480 bases/basepairs, about 380 to about 480 bases/basepairs, about 390 to about 480 bases/basepairs, about 400 to about 480 bases/basepairs, about 410 to about 3480 bases/basepairs, about 420 to about 480 bases/basepairs, about 430 to about 480 bases/basepairs, about 440 to about 480 bases/basepairs, about 450 to about 480 bases/basepairs, about 460 to about 480 bases/basepairs, about 470 to about 480 bases/basepairs, about 350 to about 470 bases/basepairs, about 360 to about 470 bases/basepairs, about 370 to about 470 bases/basepairs, about 380 to about 470 bases/basepairs, about 390 to about 470 bases/basepairs, about 400 to about 470 bases/basepairs, about 410 to about 470 bases/basepairs, about 420 to about 470 bases/basepairs, about 430 to about 470 bases/basepairs, about 440 to about 470 bases/basepairs, about 450 to about 470 bases/basepairs, about 460 to about 470 bases/basepairs, about 350 to about 460 bases/basepairs, about 360 to about 460 bases/basepairs, about 370 to about 460 bases/basepairs, about 380 to about 460 bases/basepairs, about 390 to about 460 bases/basepairs, about 400 to about 460 bases/basepairs, about 410 to about 460 bases/basepairs, about 420 to about 460 bases/basepairs, about 430 to about 460 bases/basepairs, about 440 to about 460 bases/basepairs, about 450 to about 460 bases/basepairs, about 350 to about 450 bases/basepairs, about 360 to about 450 bases/basepairs, about 370 to about 450 bases/basepairs, about 380 to about 450 bases/basepairs, about 390 to about 450 bases/basepairs, about 400 to about 450 bases/basepairs, about 410 to about 450 bases/basepairs, about 420 to about 450 bases/basepairs, about 430 to about 450 bases/basepairs, about 440 to about 450 bases/basepairs, about 350 to about 440 bases/basepairs, about 360 to about 440 bases/basepairs, about 370 to about 440 bases/basepairs, about 380 to about 440 bases/basepairs, about 390 to about 440 bases/basepairs, about 400 to about 440 bases/basepairs, about 410 to about 440 bases/basepairs, about 420 to about 440 bases/basepairs, about 430 to about 440 bases/basepairs, about 350 to about 430 bases/basepairs, about 360 to about 430 bases/basepairs, about 370 to about 430 bases/basepairs, about 380 to about 430 bases/basepairs, about 390 to about 430 bases/basepairs, about 400 to about 430 bases/basepairs, about 410 to about 430 bases/basepairs, about 420 to about 430 bases/basepairs, about 350 to about 420 bases/basepairs, about 360 to about 420 bases/basepairs, about 370 to about 420 bases/basepairs, about 380 to about 420 bases/basepairs, about 390 to about 420 bases/basepairs, about 400 to about 420 bases/basepairs, about 410 to about 420 bases/basepairs, about 350 to about 410 bases/basepairs, about 360 to about 410 bases/basepairs, about 370 to about 410 bases/basepairs, about 380 to about 410 bases/basepairs, about 390 to about 410 bases/basepairs, about 400 to about 410 bases/basepairs about 350 to about 400 bases/basepairs, about 360 to about 400 bases/basepairs, about 370 to about 400 bases/basepairs, about 380 to about 400 bases/basepairs, about 390 to about 400 bases/basepairs, about 350 to about 390 bases/basepairs, about 360 to about 390 bases/basepairs, about 370 to about 390 bases/basepairs, about 380 to about 390 bases/basepairs, about 350 to about 380 bases/basepairs, about 360 to about 380 bases/basepairs, about 370 to about 380 bases/basepairs, about 350 to about 370 bases/basepairs, about 360 to about 370 bases/basepairs, or about 350 to about 360 bases/basepairs in length.

[0089] The methods may further include removing residual RNA from the cDNA prior to amplification. For example, removal of residual RNA can be accomplished by enzymatic methods, hybridization methods, filtration methods, and the like. In some embodiments, the methods further comprise treating the cDNA mixture with an RNase.

[0090] In some embodiments, the amplicons are purified prior to sequencing. The purification may comprise size separation, removal of single-stranded nucleic impurities, and the like. In some embodiments, the methods further comprise separating the target amplicons based on size selection following amplicon production. In some embodiments, the methods further comprise removing the single stranded nucleic acids, including unused primers, following amplicon production. In some embodiments, the purification includes enzymatic methods (e.g., exonuclease digestion), hybridization methods, chromatographic methods (e.g., specific affinity columns or beads), filtration methods, and the like.

[0091] Once amplified, the amplicons can be subject to any known DNA sequencing technique, including conventional sequencing techniques or next generation sequencing (NGS) techniques. As used herein, the term “next generation sequencing” (NGS) or “high throughput sequencing” refers to the so-called parallel sequencing-by-synthesis or ligation sequencing platform currently employed by Illumina, Life Technologies, Roche, etc. Next generation sequencing methods may also include Nanopore sequencing methods such as commercialized by Oxford Nanopore Technologies, electron detection methods such as Ion Torrent technology commercialized by Life Technologies, and single molecule fluorescence based methods such as commercialized by Pacific Biosciences.

[0092] Adaptors can be appended to the end of the amplicons for use during sequencing and the following analysis. In some embodiments, an adaptor comprising a tag (e.g., comprising a barcode sequence) is added to the target amplicon after amplification (e.g., in a ligase reaction, in a subsequent amplification reaction) to produce an identifiable adaptor-amplicon for use in the sequencing reaction. As used herein, an “adaptor” is an oligonucleotide that is linked or is designed to be linked to a nucleic acid to introduce the nucleic acid into a sequencing workflow. An adaptor may be single-stranded or double-stranded (e.g., a double-stranded DNA or a single-stranded DNA). At least a portion of the adaptor comprises a known sequence. Some embodiments of adaptors comprise a marker, index, barcode, tag, or other sequence by which the adaptor and a nucleic acid to which it is linked are identifiable. Exemplary adaptors are shown in FIGS. 1 and 2.

[0093] Analysis of the data following NGS techniques can use various commercial programs (e.g., GeneSpring™ from Agilent Technologies) to derive information such as dominant transcript isoforms, relative abundance information, and primary genomic sequence identity by various alignment and quantification methods. In some embodiments, the resulting transcriptomic analysis can in turn be used for proteomic analysis.

[0094] In some embodiments, a control is analyzed concurrently with the target, such that results can be compared or validated on the basis of the control. As used herein, the term “control” when used in reference to nucleic acid analysis refers to a nucleic acid having known features (e.g., known sequence, known copy-number per cell), for use in comparison to an experimental target (e.g., a nucleic acid of unknown concentration). A control may be an endogenous, preferably invariant gene against which a test or target nucleic acid in an assay can be normalized. Controls may also be external.

[0095] In some embodiments, the method disclosed herein includes use of an external RNA control which is added at any point in the method prior to the amplification. As such, the methods may further comprise adding external RNA control to the sample. When using an external RNA control, the control may be added prior to RNA extraction or prior to reverse transcription and production of cDNA. Accordingly, the amplification may further comprise contacting the sample with a pair of oligonucleotide primers configured to specifically amplify the external RNA control.

[0096] In some embodiments, the transcriptomic profiling comprises determining a gene expression or relative gene expression of the target RNAs. Assaying the expression level for a plurality of target genes may comprise the use of an algorithm or classifier. Transcriptomic profiling may further be used to compare transcript sequences to genomic sequences for the subject. Thus, transcriptomic profiling may result in the discovery of alternative transcripts, gene fusions, and allele-specific expression patterns.

[0097] In some embodiments, the methods may further comprise quantifying protein levels in the fecal sample corresponding or in addition to those gene targets in the transcriptomic analysis. For example, the methods may comprise determining protein levels for a transcript showing particularly high or low expression.

[0098] In some embodiments, the transcriptomic profiling comprises analyzing relationship between gene expression and cellular lineage. For example, gene expression in different tissues or cell types can be determined by conventional methods and compared to the transcriptomic data. Thus, the transcriptomic data can be correlated to certain tissues or cell types.

[0099] In some embodiments, the methods comprise correlating the transcriptomic data with gut microbiome data. For example, the methods described herein may be alternatively used to amplify RNA derived from gut bacteria cells found in the fecal sample to determine state of the gut microbiome (e.g., to determine the relative abundance of individual organisms). Alternatively or in addition, the gut microbiome may be profiled by, for example, other microbial transcriptomic approaches, metagenomic approaches (e.g., shotgun sequencing, 16S rRNA-based approaches), culturomic approaches, metabolomic approaches, and combinations thereof. The methods can be combined with monitoring of the gut microbiome over time providing analysis of the correlation and links between microbiota species and gene expression of gastrointestinal tract for increasing the understanding mechanism of host-microbe interactions and developing novel probiotics.

[0100] In some embodiments, the methods further comprise obtaining the fecal sample from a subject and processing the sample, as described elsewhere herein, by homogenization, cell lysis, and RNA extraction. In some embodiments, the subject is human. In some embodiments, in the methods disclosed herein, the subject has or is suspected of having a disease or disorder (e.g., gastrointestinal disease or disorder).

[0101] The fecal samples may be obtained in a medical facility, e.g., at an Emergency Room, urgent care clinic, walk-in clinic, a long-term care facility, or another appropriate site of medical practice. The subject sample may be obtained in a home or residential setting (e.g., a senior living or hospice setting) and transported to a second site (e.g., laboratory or medical facility) for analysis.

### Monitoring and Diagnosis

[0102] Transcriptome profiling using the methods disclosed herein facilitates the analysis of differentially expressed genes as a transcriptional response to different environmental stimuli or physiological/pathological conditions.

[0103] Accordingly, the disclosed methods may be used to detect or identify a disease state or disorder of a subject, determine the likelihood that a subject will contract a given disease or disorder, determine the likelihood that a subject with a disease or disorder will respond to therapy, determine the prognosis of a subject with a disease or disorder (or its likely progression or regression), and determine the effect of a treatment on a subject with a disease or disorder. For example, the disclosed methods may be used to determine whether or not a subject is suffering from a given disease or disorder. In some embodiments, the disclosed methods can be used to compare normal healthy subjects with subjects having a disease or disorder. In some embodiments, the disclosed methods can be used to compare subtypes or stages of a disease or disorder.

[0104] The disclosed methods, and the resulting transcriptomic data, may also be used in combination with other genomic, epigenomic, proteomic, and/or metabolomic data for the analysis and diagnosis of diseases and disorders, particularly complex diseases and disorders. Thus, the disclosed methods may be used alone or as part of a multi-omic approach to study diseases and disorders, identify biomarkers in diseases and disorders, and aid in the diagnosis of diseases and disorders. For example, the disclosed methods may be used to identify differential expression of a gene or set of genes based on a physiological/pathological condition, which can then be used as biomarkers or for diagnostic methods.

[0105] Thus, in some embodiments, in the methods disclosed herein, the subject has or is suspected of having a disease or disorder. The disease or disorder may comprise a gastrointestinal disease or disorder, a metabolic disease or disorder, a neurological disease or disorder, a cardiovascular disease or disorder, an infectious disease or disorder, and/or a respiratory disease or disorder.

[0106] In select embodiments, the subject has or is suspected of having a gastrointestinal disease or disorder. Gastrointestinal disease and disorders include a wide range of diseases affecting the esophagus, liver, stomach, small and large intestines, gallbladder, and pancreas. Exemplary gastrointestinal diseases and disorders include, but are not limited to, irritable bowel syndrome (IBS), colitis (e.g., infectious colitis, ulcerative colitis, Crohn's disease, ischemic colitis, radiation colitis), colon polyps and cancer, peptic ulcer disease, gastritis, gastroenteritis, celiac disease, gallstones, fecal incontinence, lactose intolerance, Hirschsprung disease, abdominal adhesions, Barrett's esophagus, appendicitis, indigestion (dyspepsia), intestinal pseudo-obstruction, pancreatitis, short bowel syndrome, Whipple's disease, Zollinger-Ellison syndrome, malabsorption syndromes and hepatitis.

[0107] The methods disclosed herein can be used for monitoring progression of a disease or disorder and/or response to treatment. For example, two or more samples are obtained, wherein the two or more samples are separated by a period of time. Specifically, a subsequent sample can be obtained minutes, hours, days, weeks, months, or years after an initial sample was obtained. The transcriptomic profile may be obtained for each of the samples and changes between the fecal samples can be determined. In some embodiments, the changes in the transcriptome profile are associated with progression or regression of the disease or disorder.

[0108] In some embodiments, the methods described herein are integrated into a treatment method for a subject. For example, in some embodiments, a subject provides a fecal sample, the fecal sample is analyzed by the methods described herein, a report of the results is generated, and the subject is treated based on the results (e.g., commence a new treatment, continue existing treatment, change in treatment (e.g., change in intervention type, dose, timing, etc.), hospitalization, watchful waiting, etc.).

[0109] Treatments for example, may include administering to the subject an effective amount of anti-inflammatory drugs, antibiotics, immune system suppressors, Janus kinase inhibitors, probiotics, biologics (e.g., natalizumab, vedolizumab, infliximab, adalimumab, certolizumab pegol, golimumab, and ustekinumab), analgesics, anti-diarrheals, serotonergic agents, antidepressants, chloride channel activators, chloride channel blockers, guanylate cyclase agonists, opioids, pancreatin, intravenous fluids, an intestinal alkaline phosphatase (iAP) protein replacement composition, parenteral (or intravenous) nutrition (including vitamins and supplements), or a combination thereof.

[0110] The disclosed methods may also be used to assess overall gut health or wellness in any subject at a single point in time or monitor gut health or wellness over a longer period of time. There is a known relationship between good gut health and the overall health of a subject and the disclosed methods would provide a way to monitor, promote and take steps to improve gut health in an individual. Overall gut health or wellness can be assessed by evaluating gene functions involved in basic gut physiology, including gut motility, barrier function, bile acid metabolism, and gut-brain signaling. In some embodiments, the subject is a healthy individual. In some embodiments, the subject is not suffering from a gastrointestinal disease or disorder.

[0111] In some embodiments, the methods comprise generating a transcriptome profile of subject cells in one or more fecal samples from the subject by the methods disclosed herein and comparing the transcriptome profile to one or more controls to determine a measurement or assessment of overall gut health. In some embodiments, the one or more fecal samples may be separated from each other by a period of time ranging for weeks, months or years.

[0112] The assessment can be provided as any type of output (e.g., a score or grade) which is associated with the overall health or condition of the subject's gut. In some embodiments, the methods further comprise preparing the assessment and/or reporting the assessment to the subject. The assessment may further comprise instructions on improving gut health or steps to take to reverse any unwanted changes in gut health. For example, gut management instructions may include diet and nutrition suggestions, food allergy or intolerance information, or information on related health concerns (e.g., weight control, stress management, and the like.)

### Kits or Systems

[0113] Also provided herein are systems or kits for carrying out the disclosed methods. In some embodiments, the kit comprises primers or primer pairs specific for a target sequence, for example those described herein in Tables 1 and 2. The primers or pairs of primers are suitable for selectively amplifying the target sequences. The kit may comprise at least two, three, four or five primers or pairs of primers suitable for selectively amplifying one or more targets. The kit may comprise at least 5, 10, 15, 20, 30, 40, 50, 60, 70, 80, 90, 100, 110, or more primers or pairs of primers suitable for selectively amplifying one or more targets.

[0114] The kit may further comprise reagents for extracting or purifying RNA, amplifying and detecting nucleic acid sequences, and instructions for amplifying and sequencing target sequences. Examples of suitable reagents for inclusion in the kit (in addition to the oligonucleotides described herein) include conventional reagents employed in nucleic acid amplification reactions, such as, for example, one or more enzymes having polymerase activity, enzyme cofactors (such as magnesium or nicotinamide adenine dinucleotide (NAD)), salts, buffers, deoxyribonucleotide, or ribonucleotide triphosphates (dNTPs/rNTPs; for example, deoxyadenosine triphosphate, deoxyguanosine triphosphate, deoxycytidine triphosphate, and deoxythymidine triphosphate) blocking agents, labeling agents, and the like.

[0115] The kit may comprise instructions for using the reagents and primers described herein, e.g., for processing the test sample, extracting nucleic acid molecules, and/or performing the test; and for interpreting the results obtained. The instructions may be printed or provided electronically (e.g., DVD, CD, or available for viewing or acquiring via internet resources).

[0116] The kit may be supplied in a solid (e.g., lyophilized) or liquid form. The various components of the kit of the present disclosure may optionally be contained within different containers (e.g., vial, ampoule, test tube, flask, or bottle) for each individual component (e.g., amplification oligonucleotides, probe oligonucleotides, or buffer). Each component will generally be suitable as aliquoted in its respective container or provided in a concentrated form. Other containers suitable for conducting certain steps of the amplification/detection assay may also be provided. The individual containers are preferably maintained in close confinement for commercial sale.

### EXAMPLES

[0117] The following are examples of the present invention and are not to be construed as limiting.

### Materials and Methods

[0118] Fecal RNA extraction Frozen (−80° C.) fecal samples are removed and weighed, if desired. Weights of fecal samples were used to measure absolute abundance values. DNA/RNA Shield buffer (500-1000 μL) was added to the sample while the fecal sample was still frozen. The fecal samples were incubated on ice to thaw for at least 30 minutes. Glass beads were added to each sample or sample aliquot and mechanical beating with the beads was used to homogenize the fecal sample. Following homogenization, the sample is left on ice for 30 minutes, to lyse fragile host cells and release RNA into solution, while minimizing lysis of any microbial cells in the sample. To remove cellular and dietary debris, the incubated sample was centrifuged at 4300 g for 5 minutes at 4° C., and the supernatant was retained. Optionally, external RNA control (ERCC) was added into each sample supernatant. For each pellet of mice feces input, 10 μL of 0.01 ng/μL ERCC was added.

[0119] RNA extraction was completed using standard Direct-zol RNA extraction according to manufacturer's protocols. TRIzol reagent (600 μL) was added to each sample supernatant, mixed by inversion, and incubated at room temperature for 15 to 30 minutes for cell lysis. Following removal of solid contaminants by centrifugation for 10 minutes at 4° C., an equal part of 100% ethanol was added to the resulting sample and mixed. RNA was purified using Zymo Direct-zol RNA Miniprep Kit with DNase I treatment. The concentration of RNA is measured by Quant-iT BR RNA kit with 2 μL as input. Extracted RNA can be stored at −80° C. if necessary. All downstream steps were completed using a normalized RNA concentration (600 to 1200 ng) to generate a similar amount of library per sample.

[0120] Genomic DNA Removal Genomic DNA removal was completed by Turbo DNase. Approximately 500 ng of extracted RNA was mixed with buffer and 2 μL Turbo DNase and incubated for 20 minutes at 37° C. RNase-free solid-phase reversible immobilization (SPRI) beads, were used to purify the resulting RNA.

[0121] cDNA generation cDNA was generated from the extracted fecal RNA using a high-yield reverse transcriptase with random hexamer primers. All the resulting RNA following genomic DNA removal was added to a master reaction mix comprising 50 μM random hexamer and 10 mM of each dNTP. The reaction mix was heated at 65° C. for 5 minutes and immediately put on ice for at least 1 minute. After incubation on ice, the reverse transcriptase mix (4 μL 5×SSIV buffer, 1 uL DTT 100 mM, 1 μL RNase inhibitor, 1 uL SSIV enzyme) was added and incubated at 23° C. for 10 minutes, 55° C. for 20 minutes, and 80° C. for 10 minutes. RNase H was added and the resulting mixture was incubated at 37° C. for 20 minutes. cDNA was purified and separated with 2.4×SPRI beads cleanup and elution in nuclease-free water.

[0122] Amplicon-generation Multiplex PCR was used to amplify targeted regions of genes. Multiplex PCR was carried out using 5 μL cDNA, 0.1 μM of each primer, including primer to external control RNA if used, 2 μL Taq polymerase-based Multiplex PCR 5× Master Mix, DMSO in water. The PCR methodology was as follows: 95° C. for 2 min; cycles of 95° C. for 30 sec, 61° C. for 30 sec, and 68° C. for 1 min; and 68° C. for 5 min. A limited number of cycles was used, stopping the reaction at exponential phase. For mouse samples, 14 cycles were used, whereas for human samples, 20 cycles were used. PCR product can be stored frozen until purification can be completed. The resulting amplicons were purified with enzymatic digestion (exonuclease digestion) and rigorous SPRI bead-based size selection. PCR product or purified amplicons can be stored frozen.

[0123] Adaptor addition A second PCR amplification was applied to the purified amplicons to add Indexed Illumina sequencing adapter for sequencing. The PCR reaction includes high-yield KAPA PCR master mix with 10 μM barcoded P5 and P7 primers. The PCR methodology was as follows: 98° C. for 3 min; 30 cycles of 98° C. for 20 sec, 67° C. for 15 sec, and 72° C. for 1 min; and 72° C. for 5 min. The resulting amplicons were purified with SPRI beads and gel electrophoresis-based size selection to create libraries of target amplicons.

[0124] Library Sequencing Sequencing reactions were carried out on an Illumina NextSeq system following manufacturer's instructions with an aim of 1 million reads per sample: mid-output mode: 150M reads, 150 cycle, 76 bp×2, pair-end, 15 hr; high-output mode: 400M reads, 150 cycle, 76 bp×2, pair-end, 18 hr.

TABLE 1
Mouse Gene Targets and Primers

| | Forward | Reverse | Total |
|---|---|---|---|
| | Primer | Primer | amplicon |
| Gene | SEQ ID NO | SEQ ID NO | size (bp) |
| Gnai3 | 1 | 535 | 417 |
| Narf | 2 | 536 | 392 |
| Ngfr | 3 | 537 | 406 |
| Xpo6 | 4 | 538 | 450 |
| Tfe3 | 5 | 539 | 406 |
| Brat1 | 6 | 540 | 443 |
| Gna12 | 7 | 541 | 449 |
| Dlat | 8 | 542 | 391 |
| Sdhd | 9 | 543 | 436 |
| Gpr107 | 10 | 544 | 429 |
| Nalcn | 11 | 545 | 426 |
| Btbd17 | 12 | 546 | 442 |
| Slfn4 | 13 | 547 | 416 |
| Lhx2 | 14 | 548 | 448 |
| Clec10a | 15 | 549 | 393 |
| Rtca | 16 | 550 | 438 |
| Dbt | 17 | 551 | 396 |
| Dazap2 | 18 | 552 | 434 |
| Trappc10 | 19 | 553 | 439 |
| Tbrg4 | 20 | 554 | 421 |
| Ndufa9 | 21 | 555 | 450 |
| Pparg | 22 | 556 | 417 |
| Pdgfb | 23 | 557 | 428 |
| Acvrl1 | 24 | 558 | 448 |
| Acvr1b | 25 | 559 | 448 |
| Gabra2 | 26 | 560 | 423 |
| Sez6 | 27 | 561 | 424 |
| Cd52 | 28 | 562 | 412 |
| Il12rb1 | 29 | 563 | 445 |
| Car4 | 30 | 564 | 441 |
| Il4 | 31 | 565 | 434 |
| Mmp14 | 32 | 566 | 406 |
| Ccl3 | 33 | 567 | 440 |
| Timp1 | 34 | 568 | 448 |
| Slc26a3 | 35 | 569 | 411 |
| Sema6b | 36 | 570 | 449 |
| Gabrg1 | 37 | 571 | 409 |
| Ube2c | 38 | 572 | 401 |
| Tbx21 | 39 | 573 | 417 |
| Cldn15 | 40 | 574 | 396 |
| Il16 | 41 | 575 | 416 |
| Vwf | 42 | 576 | 419 |
| Pdzd4 | 43 | 577 | 401 |
| Ncan | 44 | 578 | 413 |
| Rgs20 | 45 | 579 | 416 |
| Tgfb1 | 46 | 580 | 420 |
| Il17ra | 47 | 581 | 396 |
| Ebi3 | 48 | 582 | 426 |
| Edar | 49 | 583 | 397 |
| Hck | 50 | 584 | 420 |
| Cd79a | 51 | 585 | 392 |
| Has1 | 52 | 586 | 445 |
| Il7r | 53 | 587 | 409 |
| Stat3 | 54 | 588 | 432 |
| Stat5a | 55 | 589 | 414 |
| Psap | 56 | 590 | 447 |
| Il12b | 57 | 591 | 417 |
| Il11 | 58 | 592 | 446 |
| Ccl24 | 59 | 593 | 394 |
| Cd44 | 60 | 594 | 417 |
| Prlr | 61 | 595 | 405 |
| Il5ra | 62 | 596 | 413 |
| Kit | 63 | 597 | 430 |
| Tnfsf14 | 64 | 598 | 399 |
| Epor | 65 | 599 | 442 |
| Mpl | 66 | 600 | 437 |
| Adamts4 | 67 | 601 | 419 |
| Sod2 | 68 | 602 | 391 |
| Tgfbr1 | 69 | 603 | 403 |
| Dio2 | 70 | 604 | 400 |
| Relt | 71 | 605 | 435 |
| Bmp7 | 72 | 606 | 417 |
| Ccl8 | 73 | 607 | 414 |
| Mpo | 74 | 608 | 417 |
| Met | 75 | 609 | 424 |
| Tnfrsf13b | 76 | 610 | 426 |
| Slc5a1 | 77 | 611 | 421 |
| Lypd8 | 78 | 612 | 426 |
| 1810065E05Rik | 79 | 613 | 408 |
| Gip | 80 | 614 | 430 |
| Csf1 | 81 | 615 | 449 |
| Ace2 | 82 | 616 | 420 |
| Gzmb | 83 | 617 | 415 |
| Gata3 | 84 | 618 | 394 |
| Prpsap1 | 85 | 619 | 419 |
| Fcgr1 | 86 | 620 | 407 |
| Il17rb | 87 | 621 | 430 |
| Lbp | 88 | 622 | 443 |
| Il19 | 89 | 623 | 417 |
| Il10 | 90 | 624 | 419 |
| Slpi | 91 | 625 | 448 |
| Il13ra1 | 92 | 626 | 410 |
| Pyy | 93 | 627 | 440 |
| Ppy | 94 | 628 | 437 |
| Cd40 | 95 | 629 | 412 |
| Hnf4g | 96 | 630 | 403 |
| Ada | 97 | 631 | 437 |
| Mmp9 | 98 | 632 | 441 |
| Il12rb2 | 99 | 633 | 450 |
| Mmp7 | 100 | 634 | 412 |
| Il3 | 101 | 635 | 424 |
| Csf2 | 102 | 636 | 438 |
| Tm4sf5 | 103 | 637 | 424 |
| Cxcl16 | 104 | 638 | 428 |
| Cc14 | 105 | 639 | 403 |
| Cd70 | 106 | 640 | 435 |
| Mydgf | 107 | 641 | 450 |
| Nts | 108 | 642 | 449 |
| Enpp3 | 109 | 643 | 415 |
| Il20ra | 110 | 644 | 415 |
| Ifngr1 | 111 | 645 | 406 |
| Hkdc1 | 112 | 646 | 403 |
| Egfr | 113 | 647 | 390 |
| Lgr5 | 114 | 648 | 395 |
| 9530003J23Rik | 115 | 649 | 446 |
| Slc5a4b | 116 | 650 | 417 |
| Slc5a4a | 117 | 651 | 395 |
| Il9r | 118 | 652 | 390 |
| Madcam1 | 119 | 653 | 446 |
| Flt4 | 120 | 654 | 416 |
| Il13 | 121 | 655 | 437 |
| Upp1 | 122 | 656 | 412 |
| Npc1l1 | 123 | 657 | 446 |
| Slc7a15 | 124 | 658 | 402 |
| Tpo | 125 | 659 | 390 |
| Ccl11 | 126 | 660 | 400 |
| Ccl1 | 127 | 661 | 432 |
| Slc9a3r1 | 128 | 662 | 397 |
| Nos2 | 129 | 663 | 406 |
| Tmigd1 | 130 | 664 | 419 |
| Krt19 | 131 | 665 | 448 |
| Serpina3n | 132 | 666 | 448 |
| Arg2 | 133 | 667 | 413 |
| Ifi27l2b | 134 | 668 | 416 |
| Tubal3 | 135 | 669 | 419 |
| Tgfb3 | 136 | 670 | 394 |
| Exoc3l4 | 137 | 671 | 411 |
| Prl | 138 | 672 | 400 |
| Cxcl14 | 139 | 673 | 423 |
| Il9 | 140 | 674 | 414 |
| Ocln | 141 | 675 | 447 |
| Il6st | 142 | 676 | 425 |
| Bmpr1a | 143 | 677 | 434 |
| Tnfsf11 | 144 | 678 | 435 |
| Olfm4 | 145 | 679 | 446 |
| Tnfrsf10b | 146 | 680 | 444 |
| Acod1 | 147 | 681 | 422 |
| Osmr | 148 | 682 | 420 |
| Tnfrsf17 | 149 | 683 | 450 |
| Cldn1 | 150 | 684 | 441 |
| Il1rap | 151 | 685 | 409 |
| Apod | 152 | 686 | 428 |
| Ly6g | 153 | 687 | 405 |
| Retnlb | 154 | 688 | 416 |
| Retnlg | 155 | 689 | 409 |
| Cd86 | 156 | 690 | 427 |
| Ifngr2 | 157 | 691 | 401 |
| Ifnar1 | 158 | 692 | 437 |
| Il10rb | 159 | 693 | 426 |
| Ifnar2 | 160 | 694 | 395 |
| Cela1 | 161 | 695 | 431 |
| Krt18 | 162 | 696 | 410 |
| Amhr2 | 163 | 697 | 427 |
| Fabp2 | 164 | 698 | 403 |
| Cxcl13 | 165 | 699 | 407 |
| Gzma | 166 | 700 | 419 |
| Reg2 | 167 | 701 | 446 |
| Cpn2 | 168 | 702 | 426 |
| Il15ra | 169 | 703 | 398 |
| Ccl25 | 170 | 704 | 435 |
| Cd4 | 171 | 705 | 436 |
| Tnfrsf12a | 172 | 706 | 419 |
| Tnfrsf21 | 173 | 707 | 405 |
| Vegfa | 174 | 708 | 420 |
| Tff3 | 175 | 709 | 411 |
| Tff1 | 176 | 710 | 401 |
| C3 | 177 | 711 | 422 |
| Tslp | 178 | 712 | 422 |
| Ltb | 179 | 713 | 442 |
| Tnf | 180 | 714 | 398 |
| Lta | 181 | 715 | 410 |
| Il17b | 182 | 716 | 392 |
| Pdgfrb | 183 | 717 | 396 |
| Csf1r | 184 | 718 | 422 |
| Ms4a4c | 185 | 719 | 392 |
| Ms4a6b | 186 | 720 | 405 |
| Ms4a6d | 187 | 721 | 412 |
| Slc15a3 | 188 | 722 | 391 |
| Fas | 189 | 723 | 448 |
| Jak2 | 190 | 724 | 402 |
| Tnfrsf25 | 191 | 725 | 448 |
| Il33 | 192 | 726 | 418 |
| Vegfb | 193 | 727 | 446 |
| Cyp2c55 | 194 | 728 | 404 |
| Cd7 | 195 | 729 | 443 |
| Cpn1 | 196 | 730 | 430 |
| Il23a | 197 | 731 | 408 |
| Inhbc | 198 | 732 | 409 |
| St8sia5 | 199 | 733 | 433 |
| Muc2 | 200 | 734 | 440 |
| Il6 | 201 | 735 | 448 |
| Ccr1 | 202 | 736 | 422 |
| Pdgfa | 203 | 737 | 424 |
| Casp1 | 204 | 738 | 445 |
| Il17a | 205 | 739 | 423 |
| Ccdc150 | 206 | 740 | 399 |
| Cps1 | 207 | 741 | 404 |
| Ikzf2 | 208 | 742 | 397 |
| Ctla4 | 209 | 743 | 443 |
| Il18rap | 210 | 744 | 407 |
| Ilrl1 | 211 | 745 | 422 |
| Il18r1 | 212 | 746 | 397 |
| Il1r1 | 213 | 747 | 419 |
| Il1r2 | 214 | 748 | 418 |
| Stat1 | 215 | 749 | 409 |
| Ccl20 | 216 | 750 | 398 |
| Cxcr2 | 217 | 751 | 396 |
| Ptma | 218 | 752 | 394 |
| Atg16l1 | 219 | 753 | 421 |
| Thfrsf11a | 220 | 754 | 427 |
| Marco | 221 | 755 | 428 |
| Cd55 | 222 | 756 | 424 |
| Cd55b | 223 | 757 | 438 |
| Il20 | 224 | 758 | 425 |
| Il24 | 225 | 759 | 439 |
| Mptx1 | 226 | 760 | 420 |
| Ifi211 | 227 | 761 | 448 |
| Xcl1 | 228 | 762 | 394 |
| Selp | 229 | 763 | 430 |
| Sele | 230 | 764 | 437 |
| Cr2 | 231 | 765 | 407 |
| Fcgr2b | 232 | 766 | 405 |
| Tnfsf4 | 233 | 767 | 408 |
| Vim | 234 | 768 | 398 |
| Bmi1 | 235 | 769 | 395 |
| Il2ra | 236 | 770 | 398 |
| St6galnac6 | 237 | 771 | 391 |
| Lcn2 | 238 | 772 | 422 |
| Acvr1 | 239 | 773 | 396 |
| Hc | 240 | 774 | 411 |
| Il1rn | 241 | 775 | 436 |
| Chgb | 242 | 776 | 422 |
| Bmp2 | 243 | 777 | 423 |
| Hdc | 244 | 778 | 420 |
| Il1b | 245 | 779 | 415 |
| Il1a | 246 | 780 | 398 |
| Cpxm1 | 247 | 781 | 403 |
| Zbp1 | 248 | 782 | 411 |
| Car1 | 249 | 783 | 402 |
| Il21 | 250 | 784 | 407 |
| Il2 | 251 | 785 | 434 |
| Il12a | 252 | 786 | 449 |
| Ptx3 | 253 | 787 | 399 |
| Ptpn22 | 254 | 788 | 429 |
| Reg4 | 255 | 789 | 443 |
| Vcam1 | 256 | 790 | 449 |
| Tlr2 | 257 | 791 | 412 |
| Egf | 258 | 792 | 415 |
| Pdgfc | 259 | 793 | 416 |
| Rorc | 260 | 794 | 429 |
| Clca1 | 261 | 795 | 393 |
| Gbp2 | 262 | 796 | 448 |
| Cga | 263 | 797 | 402 |
| Tnfsf8 | 264 | 798 | 442 |
| Cntfr | 265 | 799 | 434 |
| Tnfrsf1b | 266 | 800 | 442 |
| Tnfrsf8 | 267 | 801 | 449 |
| Tspan1 | 268 | 802 | 438 |
| Alpl | 269 | 803 | 447 |
| Stmn1 | 270 | 804 | 410 |
| Csf3r | 271 | 805 | 407 |
| Hgf | 272 | 806 | 408 |
| Tnfrsf9 | 273 | 807 | 399 |
| Abcb1b | 274 | 808 | 413 |
| Tnfrsf4 | 275 | 809 | 394 |
| Plb1 | 276 | 810 | 411 |
| Pdgfra | 277 | 811 | 397 |
| Slc10a6 | 278 | 812 | 445 |
| Cxcl5 | 279 | 813 | 414 |
| Ppbp | 280 | 814 | 431 |
| Pf4 | 281 | 815 | 443 |
| Ereg | 282 | 816 | 398 |
| Cxcl3 | 283 | 817 | 416 |
| Cxcl1 | 284 | 818 | 438 |
| Cxcl9 | 285 | 819 | 428 |
| Il31 | 286 | 820 | 406 |
| Ccr9 | 287 | 821 | 397 |
| Rasl11a | 288 | 822 | 411 |
| Cdx2 | 289 | 823 | 442 |
| Flt1 | 290 | 824 | 392 |
| Col1a2 | 291 | 825 | 399 |
| Epo | 292 | 826 | 417 |
| Gpnmb | 293 | 827 | 391 |
| Sval1 | 294 | 828 | 420 |
| Reg3g | 295 | 829 | 418 |
| Clec4e | 296 | 830 | 396 |
| Clec4d | 297 | 831 | 427 |
| Klrk1 | 298 | 832 | 446 |
| Cd27 | 299 | 833 | 428 |
| Ltbr | 300 | 834 | 426 |
| Tnfrsf1a | 301 | 835 | 403 |
| Tip1 | 302 | 836 | 433 |
| Tyrobp | 303 | 837 | 428 |
| Gm45837 | 304 | 838 | 410 |
| Coro1a | 305 | 839 | 396 |
| Chrdl2 | 306 | 840 | 439 |
| Il21r | 307 | 841 | 390 |
| Aqp8 | 308 | 842 | 414 |
| Pvcard | 309 | 843 | 440 |
| Oat | 310 | 844 | 450 |
| Slc6a14 | 311 | 845 | 409 |
| Cd40lg | 312 | 846 | 395 |
| Nox1 | 313 | 847 | 421 |
| Il2rg | 314 | 848 | 439 |
| Vegfd | 315 | 849 | 399 |
| Irak1 | 316 | 850 | 403 |
| F10 | 317 | 851 | 416 |
| Lamp1 | 318 | 852 | 402 |
| Tnfsf13b | 319 | 853 | 426 |
| Vegfc | 320 | 854 | 434 |
| Ido1 | 321 | 855 | 437 |
| Il15 | 322 | 856 | 394 |
| Hp | 323 | 857 | 397 |
| Il34 | 324 | 858 | 441 |
| Mt1 | 325 | 859 | 449 |
| Cx3cl1 | 326 | 860 | 390 |
| Cc122 | 327 | 861 | 425 |
| Ccl17 | 328 | 862 | 403 |
| Tirap | 329 | 863 | 393 |
| Il10ra | 330 | 864 | 432 |
| Tyk2 | 331 | 865 | 443 |
| Tgfbr2 | 332 | 866 | 441 |
| Ptgs2 | 333 | 867 | 434 |
| Ltf | 334 | 868 | 400 |
| Myd88 | 335 | 869 | 405 |
| Crlf2 | 336 | 870 | 390 |
| Egr3 | 337 | 871 | 415 |
| Slc26a2 | 338 | 872 | 416 |
| Lif | 339 | 873 | 414 |
| Eda2r | 340 | 874 | 446 |
| Ly6d | 341 | 875 | 397 |
| Cxcl10 | 342 | 876 | 448 |
| Fam151a | 343 | 877 | 439 |
| Ccl5 | 344 | 878 | 424 |
| Ubd | 345 | 879 | 390 |
| Amh | 346 | 880 | 412 |
| Ccl12 | 347 | 881 | 394 |
| Ccl7 | 348 | 882 | 430 |
| Ccl2 | 349 | 883 | 415 |
| Cer3 | 350 | 884 | 400 |
| Tnfsf9 | 351 | 885 | 429 |
| Isg15 | 352 | 886 | 426 |
| Il5 | 353 | 887 | 436 |
| Leap2 | 354 | 888 | 429 |
| Clca3b | 355 | 889 | 409 |
| Inhbb | 356 | 890 | 440 |
| Lrg1 | 357 | 891 | 392 |
| Lypd8l | 358 | 892 | 400 |
| Il22ra1 | 359 | 893 | 443 |
| Icam1 | 360 | 894 | 441 |
| Serpine1 | 361 | 895 | 420 |
| Cer7 | 362 | 896 | 390 |
| Csf3 | 363 | 897 | 421 |
| Itln1 | 364 | 898 | 400 |
| Gdf5 | 365 | 899 | 409 |
| Cd160 | 366 | 900 | 394 |
| Sct | 367 | 901 | 430 |
| Tlr4 | 368 | 902 | 430 |
| Il18 | 369 | 903 | 402 |
| Tgfb2 | 370 | 904 | 416 |
| Lgi2 | 371 | 905 | 450 |
| Tnfsf10 | 372 | 906 | 391 |
| Il22ra2 | 373 | 907 | 438 |
| Ptger4 | 374 | 908 | 433 |
| Saa3 | 375 | 909 | 394 |
| I17 | 376 | 910 | 395 |
| Abcb1a | 377 | 911 | 396 |
| Clcf1 | 378 | 912 | 392 |
| 1l25 | 379 | 913 | 408 |
| Chil3 | 380 | 914 | 432 |
| Ccr6 | 381 | 915 | 439 |
| Inhba | 382 | 916 | 409 |
| Bdkrb1 | 383 | 917 | 406 |
| Serpina3g | 384 | 918 | 390 |
| 1l17f | 385 | 919 | 401 |
| Tnfrsf18 | 386 | 920 | 391 |
| Ccr8 | 387 | 921 | 413 |
| Tnfrsf14 | 388 | 922 | 421 |
| Ctf1 | 389 | 923 | 414 |
| Muc1 | 390 | 924 | 427 |
| Flt3 | 391 | 925 | 450 |
| Wfdc12 | 392 | 926 | 400 |
| Ifnk | 393 | 927 | 426 |
| Mmp3 | 394 | 928 | 400 |
| Ccr10 | 395 | 929 | 431 |
| Il20rb | 396 | 930 | 420 |
| Il27 | 397 | 931 | 390 |
| Defb1 | 398 | 932 | 406 |
| Tlr9 | 399 | 933 | 390 |
| Ifne | 400 | 934 | 407 |
| Cxcr4 | 401 | 935 | 399 |
| Calhm6 | 402 | 936 | 398 |
| Il17c | 403 | 937 | 432 |
| Bst2 | 404 | 938 | 413 |
| Cd24a | 405 | 939 | 395 |
| H2bc6 | 406 | 940 | 443 |
| Ptgs1 | 407 | 941 | 440 |
| Inhbe | 408 | 942 | 412 |
| Mmp10 | 409 | 943 | 420 |
| Fcgbp | 410 | 944 | 390 |
| Cxcr5 | 411 | 945 | 390 |
| Ccr4 | 412 | 946 | 396 |
| Col6a3 | 413 | 947 | 405 |
| Cxcr1 | 414 | 948 | 397 |
| Cxcr6 | 415 | 949 | 421 |
| Ifnb1 | 416 | 950 | 412 |
| Il23r | 417 | 951 | 449 |
| Ccr2 | 418 | 952 | 435 |
| Zg16 | 419 | 953 | 391 |
| Il17d | 420 | 954 | 436 |
| Cxcr3 | 421 | 955 | 395 |
| Tnfsf15 | 422 | 956 | 391 |
| Mmp13 | 423 | 957 | 446 |
| Plekho2 | 424 | 958 | 411 |
| Siglech | 425 | 959 | 420 |
| Acvr2a | 426 | 960 | 407 |
| Cx3cr1 | 427 | 961 | 419 |
| Cemip | 428 | 962 | 438 |
| Bmpr1b | 429 | 963 | 408 |
| Sh2d6 | 430 | 964 | 403 |
| Socs3 | 431 | 965 | 448 |
| Iigp1 | 432 | 966 | 424 |
| Lifr | 433 | 967 | 433 |
| Fabp1 | 434 | 968 | 416 |
| Hmgb2 | 435 | 969 | 436 |
| Ifng | 436 | 970 | 409 |
| Ghr | 437 | 971 | 392 |
| Nod2 | 438 | 972 | 421 |
| Cyp3a11 | 439 | 973 | 406 |
| S100a8 | 440 | 974 | 416 |
| S100a9 | 441 | 975 | 399 |
| Nfil3 | 442 | 976 | 446 |
| Gapdh | 443 | 977 | 434 |
| Lepr | 444 | 978 | 430 |
| Cxcl2 | 445 | 979 | 422 |
| Fcer1g | 446 | 980 | 397 |
| Osm | 447 | 981 | 431 |
| Fcgr4 | 448 | 982 | 443 |
| Ifitm6 | 449 | 983 | 449 |
| Ifnl2 | 450 | 984 | 440 |
| Lep | 451 | 985 | 409 |
| Defb4 | 452 | 986 | 401 |
| Csf2ra | 453 | 987 | 419 |
| Eda | 454 | 988 | 420 |
| Reg1 | 455 | 989 | 419 |
| Cxcl11 | 456 | 990 | 395 |
| Cxcl17 | 457 | 991 | 400 |
| Xcr1 | 458 | 992 | 390 |
| Tnfrsf19 | 459 | 993 | 434 |
| Ifnl3 | 460 | 994 | 409 |
| Cxcl12 | 461 | 995 | 444 |
| Acvr2b | 462 | 996 | 410 |
| Ifnlr1 | 463 | 997 | 395 |
| Gm49339 | 464 | 998 | 418 |
| Kdr | 465 | 999 | 406 |
| Ifna13 | 466 | 1000 | 414 |
| Ly6m | 467 | 1001 | 399 |
| Tnfrsf11b | 468 | 1002 | 417 |
| Defa24 | 469 | 1003 | 395 |
| Serpina3f | 470 | 1004 | 401 |
| Tnfsf18 | 471 | 1005 | 448 |
| Jchain | 472 | 1006 | 448 |
| Bmpr2 | 473 | 1007 | 410 |
| Cyp2d9 | 474 | 1008 | 439 |
| Tnfrsf13c | 475 | 1009 | 414 |
| Il2rb | 476 | 1010 | 444 |
| Clca4a | 477 | 1011 | 415 |
| Il3ra | 478 | 1012 | 427 |
| Lyz1 | 479 | 1013 | 423 |
| Lyz2 | 480 | 1014 | 422 |
| Wfdc17 | 481 | 1015 | 437 |
| Il18bp | 482 | 1016 | 431 |
| Ifna4 | 483 | 1017 | 446 |
| Ccl19 | 484 | 1018 | 393 |
| Reg3b | 485 | 1019 | 390 |
| Csf2rb | 486 | 1020 | 399 |
| Gm14698 | 487 | 1021 | 402 |
| C4b | 488 | 1022 | 400 |
| Pappa2 | 489 | 1023 | 447 |
| Gm13304 | 490 | 1024 | 410 |
| Gsta1 | 491 | 1025 | 391 |
| Clca4b | 492 | 1026 | 415 |
| Defa22 | 493 | 1027 | 394 |
| Defa30 | 494 | 1028 | 390 |
| Defa21 | 495 | 1029 | 394 |
| Sirpb1c | 496 | 1030 | 442 |
| Il22 | 497 | 1031 | 410 |
| Ccl28 | 498 | 1032 | 402 |
| Grem1 | 499 | 1033 | 397 |
| Cd80 | 500 | 1034 | 415 |
| Ly6a | 501 | 1035 | 404 |
| Trbc2 | 502 | 1036 | 442 |
| Igkc | 503 | 1037 | 394 |
| Ifna2 | 504 | 1038 | 400 |
| Ifna16 | 505 | 1039 | 428 |
| Gm9733 | 506 | 1040 | 437 |
| Gm14288 | 507 | 1041 | 403 |
| Tgtp2 | 508 | 1042 | 399 |
| Tgtp1 | 509 | 1043 | 399 |
| Serpina3m | 510 | 1044 | 420 |
| Ccr5 | 511 | 1045 | 415 |
| Gm43302 | 512 | 1046 | 407 |
| Cntf | 513 | 1047 | 442 |
| Tnfsf13 | 514 | 1048 | 408 |
| Ugt1a8 | 515 | 1049 | 432 |
| Bcl2a1b | 516 | 1050 | 443 |
| Pakap | 517 | 1051 | 414 |
| Ugt1a9 | 518 | 1052 | 432 |
| Iltifb | 519 | 1053 | 398 |
| Gm20458 | 520 | 1054 | 436 |
| Igha | 521 | 1055 | 421 |
| Ifna1 | 522 | 1056 | 391 |
| Sirpb1a | 523 | 1057 | 449 |
| Ifna14 | 524 | 1058 | 446 |
| Gm5849 | 525 | 1059 | 444 |
| Ifna5 | 526 | 1060 | 392 |
| Tnfsf12 | 527 | 1061 | 411 |
| Ifna7 | 528 | 1062 | 432 |
| Ifna6 | 529 | 1063 | 392 |
| Ms4a4a | 530 | 1064 | 393 |
| Gbp6 | 531 | 1065 | 410 |
| Gbp5 | 532 | 1066 | 417 |
| Lilr4b | 533 | 1067 | 427 |
| Lilrb4a | 534 | 1068 | 418 |

TABLE 2
Human Gene Targets and Primers

| | Forward | Reverse | Total |
|---|---|---|---|
| | Primer | Primer | amplicon |
| Gene | SEQ ID NO | SEQ ID NO | size (bp) |
| NKX2-3 | 1069 | 1612 | 449 |
| MYD88 | 1070 | 1613 | 409 |
| GP2 | 1071 | 1614 | 391 |
| ACVR2A | 1072 | 1615 | 417 |
| IL22RA1 | 1073 | 1616 | 419 |
| HPRT1 | 1074 | 1617 | 390 |
| IL18RAP | 1075 | 1618 | 449 |
| RAC2 | 1076 | 1619 | 437 |
| TGFBR1 | 1077 | 1620 | 417 |
| IL7R | 1078 | 1621 | 430 |
| IL37 | 1079 | 1622 | 396 |
| BAX | 1080 | 1623 | 409 |
| TP53 | 1081 | 1624 | 426 |
| IFNGR1 | 1082 | 1625 | 404 |
| TLR1 | 1083 | 1626 | 403 |
| LTA | 1084 | 1627 | 426 |
| CD27 | 1085 | 1628 | 410 |
| NEUROD1 | 1086 | 1629 | 413 |
| SLC4A4 | 1087 | 1630 | 438 |
| CCR1 | 1088 | 1631 | 400 |
| IL3 | 1089 | 1632 | 394 |
| CCR7 | 1090 | 1633 | 436 |
| IL6ST | 1091 | 1634 | 440 |
| PUS10 | 1092 | 1635 | 437 |
| CNTF | 1093 | 1636 | 399 |
| NPW | 1094 | 1637 | 400 |
| CCL20 | 1095 | 1638 | 405 |
| BATF | 1096 | 1639 | 409 |
| HMOX1 | 1097 | 1640 | 444 |
| IL1RL1 | 1098 | 1641 | 422 |
| CFLAR | 1099 | 1642 | 424 |
| CSF2 | 1100 | 1643 | 434 |
| ICAM3 | 1101 | 1644 | 428 |
| VIM | 1102 | 1645 | 433 |
| ZG16 | 1103 | 1646 | 438 |
| DEFA5 | 1104 | 1647 | 430 |
| NLRX1 | 1105 | 1648 | 429 |
| BMP7 | 1106 | 1649 | 391 |
| ABCB1 | 1107 | 1650 | 413 |
| NOD1 | 1108 | 1651 | 404 |
| NLRP12 | 1109 | 1652 | 409 |
| PCNA | 1110 | 1653 | 438 |
| CCL5 | 1111 | 1654 | 412 |
| LTB | 1112 | 1655 | 437 |
| IL10RA | 1113 | 1656 | 428 |
| IL31RA | 1114 | 1657 | 402 |
| TGFB1 | 1115 | 1658 | 411 |
| IL13 | 1116 | 1659 | 398 |
| IL11RA | 1117 | 1660 | 447 |
| TNFRSF19 | 1118 | 1661 | 412 |
| SLC22A5 | 1119 | 1662 | 440 |
| CD70 | 1120 | 1663 | 405 |
| IL27 | 1121 | 1664 | 449 |
| ITGB1 | 1122 | 1665 | 427 |
| ACTB | 1123 | 1666 | 412 |
| EDA2R | 1124 | 1667 | 429 |
| AKT1 | 1125 | 1668 | 425 |
| LACC1 | 1126 | 1669 | 401 |
| CD80 | 1127 | 1670 | 445 |
| PRDM1 | 1128 | 1671 | 428 |
| CRP | 1129 | 1672 | 416 |
| SELENBP1 | 1130 | 1673 | 432 |
| WFDC3 | 1131 | 1674 | 402 |
| AIM2 | 1132 | 1675 | 439 |
| IL9 | 1133 | 1676 | 422 |
| ATG4A | 1134 | 1677 | 392 |
| SLC16A1 | 1135 | 1678 | 431 |
| BMPR1A | 1136 | 1679 | 403 |
| IFNW1 | 1137 | 1680 | 396 |
| FABP2 | 1138 | 1681 | 399 |
| IFNG | 1139 | 1682 | 436 |
| RIPK2 | 1140 | 1683 | 398 |
| IFNAR2 | 1141 | 1684 | 414 |
| FRZB | 1142 | 1685 | 398 |
| CCL13 | 1143 | 1686 | 395 |
| BCL2 | 1144 | 1687 | 401 |
| RUNX3 | 1145 | 1688 | 433 |
| LIF | 1146 | 1689 | 401 |
| PIK3CA | 1147 | 1690 | 423 |
| IL11 | 1148 | 1691 | 402 |
| ITGAX | 1149 | 1692 | 396 |
| LRP6 | 1150 | 1693 | 426 |
| MEFV | 1151 | 1694 | 412 |
| ECM1 | 1152 | 1695 | 445 |
| TIGIT | 1153 | 1696 | 397 |
| BAHD1 | 1154 | 1697 | 398 |
| CCL14 | 1155 | 1698 | 449 |
| CCL19 | 1156 | 1699 | 449 |
| POU2F3 | 1157 | 1700 | 390 |
| ORMDL3 | 1158 | 1701 | 443 |
| LGR5 | 1159 | 1702 | 426 |
| FABP5 | 1160 | 1703 | 438 |
| TNFRSF13C | 1161 | 1704 | 403 |
| ANK3 | 1162 | 1705 | 440 |
| XBP1 | 1163 | 1706 | 418 |
| TLR5 | 1164 | 1707 | 397 |
| MUC2 | 1165 | 1708 | 410 |
| SPIB | 1166 | 1709 | 423 |
| ACVR1B | 1167 | 1710 | 395 |
| LCK | 1168 | 1711 | 409 |
| ITGAM | 1169 | 1712 | 403 |
| IL17RA | 1170 | 1713 | 399 |
| VWF | 1171 | 1714 | 395 |
| ATG16L2 | 1172 | 1715 | 414 |
| FADS2 | 1173 | 1716 | 432 |
| GSDMB | 1174 | 1717 | 409 |
| CD19 | 1175 | 1718 | 450 |
| CLCF1 | 1176 | 1719 | 431 |
| CXCL12 | 1177 | 1720 | 405 |
| TNFRSF10A | 1178 | 1721 | 418 |
| REL | 1179 | 1722 | 403 |
| IL17C | 1180 | 1723 | 438 |
| RBP2 | 1181 | 1724 | 390 |
| TLR10 | 1182 | 1725 | 428 |
| CSF3 | 1183 | 1726 | 391 |
| JUN | 1184 | 1727 | 409 |
| CLEC7A | 1185 | 1728 | 421 |
| AVIL | 1186 | 1729 | 403 |
| IL4 | 1187 | 1730 | 392 |
| GHR | 1188 | 1731 | 437 |
| REG3A | 1189 | 1732 | 396 |
| TNFSF4 | 1190 | 1733 | 428 |
| TPH1 | 1191 | 1734 | 439 |
| HNRNPA1 | 1192 | 1735 | 420 |
| XCL1 | 1193 | 1736 | 433 |
| IL7 | 1194 | 1737 | 422 |
| CD40LG | 1195 | 1738 | 395 |
| TAGAP | 1196 | 1739 | 398 |
| ITLN1 | 1197 | 1740 | 404 |
| MPO | 1198 | 1741 | 442 |
| CCL16 | 1199 | 1742 | 439 |
| NOD2 | 1200 | 1743 | 430 |
| RGMB | 1201 | 1744 | 431 |
| F9 | 1202 | 1745 | 437 |
| TSLP | 1203 | 1746 | 448 |
| TFF3 | 1204 | 1747 | 410 |
| TNFSF8 | 1205 | 1748 | 405 |
| NR1D2 | 1206 | 1749 | 398 |
| PTGER4 | 1207 | 1750 | 426 |
| EPO | 1208 | 1751 | 422 |
| ST8SIA1 | 1209 | 1752 | 390 |
| PDGFA | 1210 | 1753 | 441 |
| CCL2 | 1211 | 1754 | 393 |
| THPO | 1212 | 1755 | 439 |
| BMP2 | 1213 | 1756 | 438 |
| RELT | 1214 | 1757 | 418 |
| PPBP | 1215 | 1758 | 399 |
| CD4 | 1216 | 1759 | 406 |
| SRC | 1217 | 1760 | 391 |
| CSF2RB | 1218 | 1761 | 410 |
| FOXP3 | 1219 | 1762 | 426 |
| IL23R | 1220 | 1763 | 414 |
| ZNF365 | 1221 | 1764 | 390 |
| DMBT1 | 1222 | 1765 | 423 |
| CSF3R | 1223 | 1766 | 401 |
| TLR3 | 1224 | 1767 | 436 |
| CHN1 | 1225 | 1768 | 393 |
| IL1R1 | 1226 | 1769 | 428 |
| CCR3 | 1227 | 1770 | 442 |
| INHBC | 1228 | 1771 | 419 |
| PI3 | 1229 | 1772 | 393 |
| CDKN2A | 1230 | 1773 | 441 |
| IL15RA | 1231 | 1774 | 404 |
| SATB2 | 1232 | 1775 | 413 |
| IL24 | 1233 | 1776 | 426 |
| TNFRSF1B | 1234 | 1777 | 414 |
| SLC25A20 | 1235 | 1778 | 443 |
| MOCOS | 1236 | 1779 | 401 |
| CCDC122 | 1237 | 1780 | 405 |
| CSF2RA | 1238 | 1781 | 400 |
| FCGBP | 1239 | 1782 | 442 |
| SMOC2 | 1240 | 1783 | 420 |
| TNFRSF11A | 1241 | 1784 | 396 |
| S1PR5 | 1242 | 1785 | 429 |
| FASLG | 1243 | 1786 | 443 |
| CCL26 | 1244 | 1787 | 424 |
| CCL4 | 1245 | 1788 | 390 |
| IL1A | 1246 | 1789 | 435 |
| SLC15A1 | 1247 | 1790 | 450 |
| DEFB4A | 1248 | 1791 | 402 |
| IL1RAP | 1249 | 1792 | 446 |
| BMPR2 | 1250 | 1793 | 396 |
| POU5F1 | 1251 | 1794 | 430 |
| TNFRSF8 | 1252 | 1795 | 409 |
| BEST4 | 1253 | 1796 | 418 |
| PLEKHO2 | 1254 | 1797 | 394 |
| PPIA | 1255 | 1798 | 425 |
| TNFSF10 | 1256 | 1799 | 423 |
| CCL21 | 1257 | 1800 | 390 |
| CXCL8 | 1258 | 1801 | 399 |
| GUCA2A | 1259 | 1802 | 399 |
| TNFRSF13B | 1260 | 1803 | 391 |
| RGS3 | 1261 | 1804 | 390 |
| IL13RA1 | 1262 | 1805 | 411 |
| TBP | 1263 | 1806 | 448 |
| CXCR4 | 1264 | 1807 | 408 |
| IL21R | 1265 | 1808 | 428 |
| TNFRSF4 | 1266 | 1809 | 391 |
| PF4 | 1267 | 1810 | 444 |
| TNF | 1268 | 1811 | 419 |
| AMH | 1269 | 1812 | 392 |
| CA7 | 1270 | 1813 | 449 |
| FABP1 | 1271 | 1814 | 433 |
| CCR2 | 1272 | 1815 | 425 |
| CXCR3 | 1273 | 1816 | 415 |
| RORA | 1274 | 1817 | 396 |
| MAPK3 | 1275 | 1818 | 444 |
| PIGR | 1276 | 1819 | 436 |
| IL6 | 1277 | 1820 | 415 |
| ZAP70 | 1278 | 1821 | 426 |
| LCN2 | 1279 | 1822 | 419 |
| DRAIC | 1280 | 1823 | 404 |
| ICAM1 | 1281 | 1824 | 432 |
| IL17F | 1282 | 1825 | 407 |
| TNFSF13 | 1283 | 1826 | 426 |
| CXCR2 | 1284 | 1827 | 419 |
| SERPINE1 | 1285 | 1828 | 450 |
| CHGB | 1286 | 1829 | 442 |
| IFNGR2 | 1287 | 1830 | 448 |
| CLEC2D | 1288 | 1831 | 402 |
| CXCL9 | 1289 | 1832 | 439 |
| SIGIRR | 1290 | 1833 | 408 |
| TRPM5 | 1291 | 1834 | 427 |
| CXCL1 | 1292 | 1835 | 419 |
| TNFRSF1A | 1293 | 1836 | 405 |
| TNFRSF18 | 1294 | 1837 | 432 |
| ATG4D | 1295 | 1838 | 408 |
| IFNK | 1296 | 1839 | 390 |
| CD28 | 1297 | 1840 | 398 |
| TNFSF11 | 1298 | 1841 | 420 |
| CCL27 | 1299 | 1842 | 390 |
| ITGAL | 1300 | 1843 | 400 |
| AQP8 | 1301 | 1844 | 392 |
| PDGFRA | 1302 | 1845 | 430 |
| BEST2 | 1303 | 1846 | 441 |
| GDF5 | 1304 | 1847 | 434 |
| IL18 | 1305 | 1848 | 432 |
| FLT1 | 1306 | 1849 | 390 |
| CXCL2 | 1307 | 1850 | 434 |
| VEGFB | 1308 | 1851 | 390 |
| IRAG2 | 1309 | 1852 | 391 |
| KCNN4 | 1310 | 1853 | 393 |
| CCL25 | 1311 | 1854 | 437 |
| MTOR | 1312 | 1855 | 433 |
| RPS18 | 1313 | 1856 | 422 |
| IL10 | 1314 | 1857 | 423 |
| HMGB1 | 1315 | 1858 | 397 |
| IL17RE | 1316 | 1859 | 412 |
| DLG5 | 1317 | 1860 | 448 |
| FLT3LG | 1318 | 1861 | 402 |
| CCR9 | 1319 | 1862 | 421 |
| HLA-DRA | 1320 | 1863 | 392 |
| IL25 | 1321 | 1864 | 426 |
| IL1R2 | 1322 | 1865 | 444 |
| RNF31 | 1323 | 1866 | 393 |
| TNFRSF10C | 1324 | 1867 | 390 |
| NGFR | 1325 | 1868 | 405 |
| CXCL11 | 1326 | 1869 | 399 |
| NTS | 1327 | 1870 | 441 |
| IL23A | 1328 | 1871 | 412 |
| IRAK3 | 1329 | 1872 | 443 |
| IRGM | 1330 | 1873 | 390 |
| PRKACB | 1331 | 1874 | 403 |
| PTEN | 1332 | 1875 | 421 |
| CD40 | 1333 | 1876 | 450 |
| PSMD4 | 1334 | 1877 | 402 |
| IL20RA | 1335 | 1878 | 434 |
| BMPR1B | 1336 | 1879 | 410 |
| TNFSF14 | 1337 | 1880 | 423 |
| NLRP6 | 1338 | 1881 | 434 |
| TGFBR3 | 1339 | 1882 | 409 |
| OSM | 1340 | 1883 | 431 |
| NFKB1 | 1341 | 1884 | 392 |
| FASN | 1342 | 1885 | 408 |
| IL22RA2 | 1343 | 1886 | 424 |
| TAC1 | 1344 | 1887 | 401 |
| GCG | 1345 | 1888 | 440 |
| FLT4 | 1346 | 1889 | 404 |
| TNFSF18 | 1347 | 1890 | 417 |
| IL18R1 | 1348 | 1891 | 393 |
| XCR1 | 1349 | 1892 | 413 |
| PDCD1 | 1350 | 1893 | 446 |
| DUOX2 | 1351 | 1894 | 397 |
| IL21 | 1352 | 1895 | 447 |
| SST | 1353 | 1896 | 415 |
| MME | 1354 | 1897 | 444 |
| CCL23 | 1355 | 1898 | 416 |
| TNFRSF11B | 1356 | 1899 | 397 |
| CUL2 | 1357 | 1900 | 410 |
| ACVR2B | 1358 | 1901 | 399 |
| MET | 1359 | 1902 | 442 |
| HORMAD2 | 1360 | 1903 | 439 |
| RIPK3 | 1361 | 1904 | 444 |
| TLR7 | 1362 | 1905 | 402 |
| TNFRSF6B | 1363 | 1906 | 399 |
| CD101 | 1364 | 1907 | 422 |
| S100A9 | 1365 | 1908 | 391 |
| NLRP7 | 1366 | 1909 | 393 |
| CCL8 | 1367 | 1910 | 437 |
| CCR6 | 1368 | 1911 | 422 |
| CA2 | 1369 | 1912 | 417 |
| GHRL | 1370 | 1913 | 415 |
| TYK2 | 1371 | 1914 | 431 |
| CASP3 | 1372 | 1915 | 432 |
| INHBB | 1373 | 1916 | 407 |
| TNFRSF21 | 1374 | 1917 | 432 |
| PDGFRB | 1375 | 1918 | 440 |
| CXCL16 | 1376 | 1919 | 390 |
| TOLLIP | 1377 | 1920 | 417 |
| PRLR | 1378 | 1921 | 413 |
| AHR | 1379 | 1922 | 419 |
| NCF4 | 1380 | 1923 | 428 |
| MAP3K8 | 1381 | 1924 | 411 |
| TNFAIP3 | 1382 | 1925 | 448 |
| TNFSF15 | 1383 | 1926 | 447 |
| FUT3 | 1384 | 1927 | 416 |
| BIRC3 | 1385 | 1928 | 450 |
| LIFR | 1386 | 1929 | 391 |
| IKBKG | 1387 | 1930 | 409 |
| VEGFA | 1388 | 1931 | 435 |
| TGFBR2 | 1389 | 1932 | 395 |
| B2M | 1390 | 1933 | 417 |
| TGFB2 | 1391 | 1934 | 394 |
| STAT1 | 1392 | 1935 | 422 |
| PDGFC | 1393 | 1936 | 392 |
| CD14 | 1394 | 1937 | 444 |
| EPCAM | 1395 | 1938 | 417 |
| EDA | 1396 | 1939 | 406 |
| MUC19 | 1397 | 1940 | 413 |
| EGF | 1398 | 1941 | 438 |
| OLFM4 | 1399 | 1942 | 421 |
| TIRAP | 1400 | 1943 | 423 |
| MST1 | 1401 | 1944 | 421 |
| PPARG | 1402 | 1945 | 444 |
| CCL17 | 1403 | 1946 | 419 |
| FCGR3A | 1404 | 1947 | 441 |
| CCL18 | 1405 | 1948 | 396 |
| TLR6 | 1406 | 1949 | 412 |
| KITLG | 1407 | 1950 | 411 |
| TCF7L2 | 1408 | 1951 | 423 |
| MLN | 1409 | 1952 | 398 |
| CIITA | 1410 | 1953 | 391 |
| IL2RA | 1411 | 1954 | 440 |
| TLR2 | 1412 | 1955 | 450 |
| IL19 | 1413 | 1956 | 392 |
| LRRK2 | 1414 | 1957 | 421 |
| CNTFR | 1415 | 1958 | 433 |
| ULK1 | 1416 | 1959 | 415 |
| IL17RC | 1417 | 1960 | 413 |
| TNFRSF12A | 1418 | 1961 | 427 |
| DEFA6 | 1419 | 1962 | 428 |
| GLI1 | 1420 | 1963 | 411 |
| IL17B | 1421 | 1964 | 400 |
| THY1 | 1422 | 1965 | 422 |
| IL17RB | 1423 | 1966 | 433 |
| PTCH1 | 1424 | 1967 | 394 |
| TNFRSF10D | 1425 | 1968 | 391 |
| CXCL5 | 1426 | 1969 | 427 |
| FGFBP2 | 1427 | 1970 | 434 |
| REG1A | 1428 | 1971 | 420 |
| ICOSLG | 1429 | 1972 | 394 |
| CX3CL1 | 1430 | 1973 | 444 |
| TNFRSF10B | 1431 | 1974 | 404 |
| VEGFD | 1432 | 1975 | 420 |
| IL3RA | 1433 | 1976 | 421 |
| CX3CR1 | 1434 | 1977 | 435 |
| IL20RB | 1435 | 1978 | 437 |
| IL9R | 1436 | 1979 | 411 |
| MYC | 1437 | 1980 | 415 |
| CDKAL1 | 1438 | 1981 | 417 |
| ASCL2 | 1439 | 1982 | 391 |
| PTPN22 | 1440 | 1983 | 417 |
| TNFRSF25 | 1441 | 1984 | 390 |
| APAF1 | 1442 | 1985 | 397 |
| SPDEF | 1443 | 1986 | 427 |
| GAPDH | 1444 | 1987 | 429 |
| ANPEP | 1445 | 1988 | 432 |
| SLC22A4 | 1446 | 1989 | 444 |
| MMP12 | 1447 | 1990 | 450 |
| DAP | 1448 | 1991 | 401 |
| ADAMDEC1 | 1449 | 1992 | 445 |
| SLC15A4 | 1450 | 1993 | 418 |
| IL5RA | 1451 | 1994 | 422 |
| EDAR | 1452 | 1995 | 437 |
| CTLA4 | 1453 | 1996 | 450 |
| CYTOR | 1454 | 1997 | 426 |
| OSMR | 1455 | 1998 | 442 |
| CXCR6 | 1456 | 1999 | 407 |
| IFNLR1 | 1457 | 2000 | 409 |
| IL2RB | 1458 | 2001 | 409 |
| APC | 1459 | 2002 | 406 |
| IFNB1 | 1460 | 2003 | 396 |
| MPL | 1461 | 2004 | 447 |
| LEPR | 1462 | 2005 | 448 |
| CCL1 | 1463 | 2006 | 445 |
| CHGA | 1464 | 2007 | 415 |
| FUT2 | 1465 | 2008 | 407 |
| CXCR1 | 1466 | 2009 | 409 |
| CLDN8 | 1467 | 2010 | 407 |
| IL4R | 1468 | 2011 | 450 |
| IL5 | 1469 | 2012 | 404 |
| CLCA1 | 1470 | 2013 | 438 |
| PDGFB | 1471 | 2014 | 392 |
| TNFRSF17 | 1472 | 2015 | 411 |
| OTOP2 | 1473 | 2016 | 446 |
| PRL | 1474 | 2017 | 419 |
| CBR3-AS1 | 1475 | 2018 | 447 |
| NCF2 | 1476 | 2019 | 429 |
| PGLYRP1 | 1477 | 2020 | 416 |
| TREM1 | 1478 | 2021 | 413 |
| IL10RB | 1479 | 2022 | 436 |
| CYLD | 1480 | 2023 | 443 |
| BCAR1 | 1481 | 2024 | 433 |
| ACVR1 | 1482 | 2025 | 426 |
| GIP | 1483 | 2026 | 433 |
| CCL3 | 1484 | 2027 | 404 |
| NLRP3 | 1485 | 2028 | 423 |
| CCL24 | 1486 | 2029 | 428 |
| JAK2 | 1487 | 2030 | 432 |
| IRF8 | 1488 | 2031 | 437 |
| CCR5 | 1489 | 2032 | 410 |
| PGK1 | 1490 | 2033 | 429 |
| SLC26A2 | 1491 | 2034 | 447 |
| ATG7 | 1492 | 2035 | 417 |
| FFAR2 | 1493 | 2036 | 434 |
| IFI44 | 1494 | 2037 | 394 |
| NR1H2 | 1495 | 2038 | 417 |
| PSTPIP1 | 1496 | 2039 | 403 |
| FFAR3 | 1497 | 2040 | 449 |
| MKI67 | 1498 | 2041 | 399 |
| HGF | 1499 | 2042 | 447 |
| WFDC2 | 1500 | 2043 | 396 |
| DEFB1 | 1501 | 2044 | 393 |
| CSF1R | 1502 | 2045 | 445 |
| AMHR2 | 1503 | 2046 | 416 |
| LEP | 1504 | 2047 | 419 |
| PF4V1 | 1505 | 2048 | 426 |
| CCR4 | 1506 | 2049 | 450 |
| NLRP10 | 1507 | 2050 | 440 |
| CD86 | 1508 | 2051 | 406 |
| IL12RB2 | 1509 | 2052 | 443 |
| CSF1 | 1510 | 2053 | 390 |
| IL26 | 1511 | 2054 | 401 |
| PTPN2 | 1512 | 2055 | 436 |
| CD68 | 1513 | 2056 | 391 |
| IFI44L | 1514 | 2057 | 447 |
| INHBA | 1515 | 2058 | 433 |
| AGR2 | 1516 | 2059 | 407 |
| CD44 | 1517 | 2060 | 438 |
| KLF6 | 1518 | 2061 | 411 |
| IGF1 | 1519 | 2062 | 396 |
| EPOR | 1520 | 2063 | 427 |
| INS | 1521 | 2064 | 450 |
| CCL22 | 1522 | 2065 | 425 |
| TLR9 | 1523 | 2066 | 402 |
| IL12B | 1524 | 2067 | 437 |
| HAPLN1 | 1525 | 2068 | 398 |
| BIRC2 | 1526 | 2069 | 420 |
| KIT | 1527 | 2070 | 437 |
| TNFRSF9 | 1528 | 2071 | 434 |
| IFNL1 | 1529 | 2072 | 424 |
| CCL7 | 1530 | 2073 | 390 |
| GUSB | 1531 | 2074 | 415 |
| ADIPOQ | 1532 | 2075 | 401 |
| EGFR | 1533 | 2076 | 398 |
| ATG5 | 1534 | 2077 | 416 |
| NLRP1 | 1535 | 2078 | 441 |
| TNFSF12 | 1536 | 2079 | 410 |
| CCR10 | 1537 | 2080 | 401 |
| CD2 | 1538 | 2081 | 443 |
| NELL1 | 1539 | 2082 | 416 |
| IL6R | 1540 | 2083 | 443 |
| VEGFC | 1541 | 2084 | 405 |
| IL17A | 1542 | 2085 | 395 |
| TFRC | 1543 | 2086 | 437 |
| IFNAR1 | 1544 | 2087 | 430 |
| CCL11 | 1545 | 2088 | 447 |
| NOX1 | 1546 | 2089 | 427 |
| CTF1 | 1547 | 2090 | 424 |
| FAS | 1548 | 2091 | 403 |
| IL12RB1 | 1549 | 2092 | 407 |
| IL2 | 1550 | 2093 | 395 |
| IL36A | 1551 | 2094 | 397 |
| MIF | 1552 | 2095 | 450 |
| SEL1L | 1553 | 2096 | 434 |
| TLR4 | 1554 | 2097 | 416 |
| IL1B | 1555 | 2098 | 432 |
| C1GALT1C1 | 1556 | 2099 | 398 |
| ABCA1 | 1557 | 2100 | 441 |
| CXCR5 | 1558 | 2101 | 407 |
| IL17D | 1559 | 2102 | 414 |
| KDR | 1560 | 2103 | 432 |
| IL22 | 1561 | 2104 | 436 |
| LTBR | 1562 | 2105 | 406 |
| CCR8 | 1563 | 2106 | 406 |
| TNFSF9 | 1564 | 2107 | 445 |
| CXCL3 | 1565 | 2108 | 393 |
| IL12A | 1566 | 2109 | 448 |
| FLT3 | 1567 | 2110 | 406 |
| IL13RA2 | 1568 | 2111 | 405 |
| CXCL14 | 1569 | 2112 | 398 |
| TLR8 | 1570 | 2113 | 406 |
| CCK | 1571 | 2114 | 421 |
| IL20 | 1572 | 2115 | 449 |
| CXCL10 | 1573 | 2116 | 392 |
| TNFRSF14 | 1574 | 2117 | 424 |
| RNF186 | 1575 | 2118 | 449 |
| YWHAZ | 1576 | 2119 | 444 |
| KLK3 | 1577 | 2120 | 407 |
| DNMT3B | 1578 | 2121 | 441 |
| CARD9 | 1579 | 2122 | 426 |
| ATG16L1 | 1580 | 2123 | 402 |
| INHBE | 1581 | 2124 | 429 |
| TNFSF13B | 1582 | 2125 | 430 |
| HDAC6 | 1583 | 2126 | 439 |
| CEACAM6 | 1584 | 2127 | 426 |
| TOP2A | 1585 | 2128 | 391 |
| IHH | 1586 | 2129 | 405 |
| IL15 | 1587 | 2130 | 435 |
| IRF1 | 1588 | 2131 | 415 |
| IRF5 | 1589 | 2132 | 419 |
| ACKR3 | 1590 | 2133 | 417 |
| PCK1 | 1591 | 2134 | 426 |
| IFNE | 1592 | 2135 | 405 |
| CRLF2 | 1593 | 2136 | 430 |
| CCL15 | 1594 | 2137 | 402 |
| BTNL2 | 1595 | 2138 | 441 |
| NOS2 | 1596 | 2139 | 403 |
| IL2RG | 1597 | 2140 | 394 |
| ERBIN | 1598 | 2141 | 401 |
| TGFB3 | 1599 | 2142 | 401 |
| SLC2A14 | 1600 | 2143 | 406 |
| ITGB2 | 1601 | 2144 | 426 |
| MUC1 | 1602 | 2145 | 423 |
| ABCA8 | 1603 | 2146 | 419 |
| CDKN1A | 1604 | 2147 | 437 |
| CXCL13 | 1605 | 2148 | 391 |
| KLK15 | 1606 | 2149 | 392 |
| CCL28 | 1607 | 2150 | 404 |
| CXCL6 | 1608 | 2151 | 425 |
| LAMB1 | 1609 | 2152 | 405 |
| IFNA1 | 1610 | 2153 | 449 |
| XIAP | 1611 | 2154 | 438 |

1. A method for transcriptome profiling, comprising:
amplifying one or more target RNA sequences from a sample comprising RNA extracted from a fecal sample from a subject to produce amplicons of less than about 500 bases in length; and
sequencing the amplicons.

2. The method of claim 1, wherein the RNA extracted from the fecal sample comprises RNA derived from subject cells and RNA derived from gut bacteria.

3. The method of claim 1, wherein the one or more target RNA sequences are derived from one or more subject genes.

4. The method of claim 3, wherein the one or more subject genes comprise a housekeeping gene, a tissue-specific gene, a cell type-specific gene, a disease related gene, a cell-signaling gene, or combinations thereof.

5. The method of claim 3, further comprising determining gene expression for the one or more subject genes.

6. The method of claim 1, wherein the one or more target RNA sequences are about 300 to about 400 nucleotides in length.

7. The method of claim 1, wherein the amplicons are about 350 to about 500 bases in length and the methods optionally further comprise purifying the amplicons based on size prior to sequencing.

8. The method of claim 1, wherein the amplifying comprises:
contacting the sample with a reverse transcriptase and random hexamer primers under conditions for DNA synthesis to form an cDNA mixture; and
contacting the cDNA mixture with a DNA polymerase and a pair of oligonucleotide primers configured to specifically amplify each of one or more target sequences under conditions for amplicon production.

9. The method of claim 8, wherein the amplicon production is limited cycle PCR amplification.

10. The method of claim 8, wherein each of the oligonucleotide primers comprises an amplicon identifier sequence and each amplicon comprises two amplicon identifier sequences flanking a target sequence.

11. The method of claim 1, further comprising one or both of: removing residual RNA from the cDNA mixture and removing single stranded nucleic acid impurities from the amplicons.

12. A method for diagnosing a disease or disorder in a subject, comprising:
generating a transcriptome profile of subject cells in a fecal sample from the subject by the method of claim 1; and
comparing the transcriptome profile to a healthy control to determine whether the individual has or has an increased likelihood of having the disease or disorder.

13. A method for monitoring the progression or regression of a disease or disorder in a subject, comprising:
acquiring two or more fecal samples from the subject, wherein the two or more fecal samples are separated by a period of time;
generating a transcriptome profile of subject cells in the two or more fecal samples by the method of claim 1;
identifying changes in the transcriptome profile between any of the fecal samples; and
optionally, associating changes in the transcriptome profile with progression or regression of the disease or disorder.

14. The method of claim 12, wherein the disease or disorder is irritable bowel syndrome (IBS), inflammatory bowel diseases (IBD), Crohn's disease (CD), Celiac's disease (CeD), ulcerative colitis (UC), and colon cancer.

15. A method for evaluating gut health in a subject, comprising:
generating a transcriptome profile of subject cells in one or more fecal samples from the subject by the method of claim 1; and
comparing the transcriptome profile of the one or more fecal samples to one or more controls to determine measure of overall gut health;
optionally identifying changes in the transcriptome profile between any of the one or more fecal samples; and associating changes in the transcriptome profile with changes in gut health; and
optionally providing an assessment of gut health.

16. The method of claim 13, wherein the disease or disorder is irritable bowel syndrome (IBS), inflammatory bowel diseases (IBD), Crohn's disease (CD), Celiac's disease (CeD), ulcerative colitis (UC), and colon cancer.

The application's sequence listing, which the Patent Office published only in electronic form, follows.

SEQUENCE LISTING (2154 sequences)

SEQ ID NO: 1 - DNA, 59 bp, synthetic construct
  source 1..59: mol_type = other DNA
cctacacgacgctcttccgatctnnnnnnacatcacaaggaggtctacactcacttcac

SEQ ID NO: 2 - DNA, 58 bp, synthetic construct
  source 1..58: mol_type = other DNA
cctacacgacgctcttccgatctnnnnnnacatcaggcaggtggatctctgtgaatta

SEQ ID NO: 3 - DNA, 57 bp, synthetic construct
  source 1..57: mol_type = other DNA
cctacacgacgctcttccgatctnnnnnnacatcacattccgaccgctgatgttcta

SEQ ID NO: 4 - DNA, 59 bp, synthetic construct
  source 1..59: mol_type = other DNA
cctacacgacgctcttccgatctnnnnnnacatcaggtttgccgtgcactttctaatac

SEQ ID NO: 5 - DNA, 59 bp, synthetic construct
  source 1..59: mol_type = other DNA
cctacacgacgctcttccgatctnnnnnnacatcagaggactctgtgctgaccttattc

SEQ ID NO: 6 - DNA, 59 bp, synthetic construct
  source 1..59: mol_type = other DNA
cctacacgacgctcttccgatctnnnnnnacatcaagaccaagggaggagaatgtagag

SEQ ID NO: 7 - DNA, 60 bp, synthetic construct
  source 1..60: mol_type = other DNA
cctacacgacgctcttccgatctnnnnnnacatcagagaaggtgaagtctgtgagcatta

SEQ ID NO: 8 - DNA, 59 bp, synthetic construct
  source 1..59: mol_type = other DNA
cctacacgacgctcttccgatctnnnnnnacatcagaagggtgttcgttagtcctcttg

SEQ ID NO: 9 - DNA, 57 bp, synthetic construct
  source 1..57: mol_type = other DNA
cctacacgacgctcttccgatctnnnnnnacatcactgctttaccaatgccgttcac

SEQ ID NO: 10 - DNA, 59 bp, synthetic construct
  source 1..59: mol_type = other DNA
cctacacgacgctcttccgatctnnnnnnacatcaccctcatacctgtaccacctagaa

SEQ ID NO: 11 - DNA, 58 bp, synthetic construct
  source 1..58: mol_type = other DNA
cctacacgacgctcttccgatctnnnnnnacatcagtttctcttgctgctgtgctatg

SEQ ID NO: 12 - DNA, 55 bp, synthetic construct
  source 1..55: mol_type = other DNA
cctacacgacgctcttccgatctnnnnnnacatcaacgcctacagcttccatcaa

SEQ ID NO: 13 - DNA, 59 bp, synthetic construct
  source 1..59: mol_type = other DNA
cctacacgacgctcttccgatctnnnnnnacatcacctgaaggtactgggtatgaacag

SEQ ID NO: 14 - DNA, 60 bp, synthetic construct
  source 1..60: mol_type = other DNA
cctacacgacgctcttccgatctnnnnnnacatcagtgctgaggaattacttgggagata

SEQ ID NO: 15 - DNA, 57 bp, synthetic construct
  source 1..57: mol_type = other DNA
cctacacgacgctcttccgatctnnnnnnacatcatggatcctggtgtcttggtttc

SEQ ID NO: 16 - DNA, 57 bp, synthetic construct
  source 1..57: mol_type = other DNA
cctacacgacgctcttccgatctnnnnnnacatcatgaagtgattgtccgagtgtcc

SEQ ID NO: 17 - DNA, 57 bp, synthetic construct
  source 1..57: mol_type = other DNA
cctacacgacgctcttccgatctnnnnnnacatcacatgcagaacttgccctctttc

SEQ ID NO: 18 - DNA, 60 bp, synthetic construct
  source 1..60: mol_type = other DNA
cctacacgacgctcttccgatctnnnnnnacatcataggtttggagggaactttgatctt

SEQ ID NO: 19 - DNA, 59 bp, synthetic construct
  source 1..59: mol_type = other DNA
cctacacgacgctcttccgatctnnnnnnacatcagcctgatgtacgactgttcaagta

SEQ ID NO: 20 - DNA, 58 bp, synthetic construct
  source 1..58: mol_type = other DNA
cctacacgacgctcttccgatctnnnnnnacatcactgctggagcaccctgaatataa

SEQ ID NO: 21 - DNA, 57 bp, synthetic construct
  source 1..57: mol_type = other DNA
cctacacgacgctcttccgatctnnnnnnacatcacacagcaacgtggtcatcaatc

SEQ ID NO: 22 - DNA, 60 bp, synthetic construct
  source 1..60: mol_type = other DNA
cctacacgacgctcttccgatctnnnnnnacatcaccacagttgatttctccagcatttc

SEQ ID NO: 23 - DNA, 58 bp, synthetic construct
  source 1..58: mol_type = other DNA
cctacacgacgctcttccgatctnnnnnnacatcagagactgctgttcacaccctaaa

SEQ ID NO: 24 - DNA, 59 bp, synthetic construct
  source 1..59: mol_type = other DNA
cctacacgacgctcttccgatctnnnnnnacatcacattgcagaagctcagtcacaatc

SEQ ID NO: 25 - DNA, 58 bp, synthetic construct
  source 1..58: mol_type = other DNA
cctacacgacgctcttccgatctnnnnnnacatcaatcaccagcgtgtctaccataac

SEQ ID NO: 26 - DNA, 59 bp, synthetic construct
  source 1..59: mol_type = other DNA
cctacacgacgctcttccgatctnnnnnnacatcagggtcacagcttcatcctactaac

SEQ ID NO: 27 - DNA, 59 bp, synthetic construct
  source 1..59: mol_type = other DNA
cctacacgacgctcttccgatctnnnnnnacatcagggaggtttctagtccctctctaa

SEQ ID NO: 28 - DNA, 59 bp, synthetic construct
  source 1..59: mol_type = other DNA
cctacacgacgctcttccgatctnnnnnnacatcaagcttcctcctcttcctcactatc

SEQ ID NO: 29 - DNA, 59 bp, synthetic construct
  source 1..59: mol_type = other DNA
cctacacgacgctcttccgatctnnnnnnacatcagttctgtagcacccttctcttctc

SEQ ID NO: 30 - DNA, 58 bp, synthetic construct
  source 1..58: mol_type = other DNA
cctacacgacgctcttccgatctnnnnnnacatcactacagtgagggagagcagtttg

SEQ ID NO: 31 - DNA, 59 bp, synthetic construct
  source 1..59: mol_type = other DNA
cctacacgacgctcttccgatctnnnnnnacatcactcgaatgtaccaggagccatatc

SEQ ID NO: 32 - DNA, 59 bp, synthetic construct
  source 1..59: mol_type = other DNA
cctacacgacgctcttccgatctnnnnnnacatcaaacaaccagaagctgaaggtagag

SEQ ID NO: 33 - DNA, 59 bp, synthetic construct
  source 1..59: mol_type = other DNA
cctacacgacgctcttccgatctnnnnnnacatcagagacctgggtccaagaatacatc

SEQ ID NO: 34 - DNA, 58 bp, synthetic construct
  source 1..58: mol_type = other DNA
cctacacgacgctcttccgatctnnnnnnacatcaggacctggtcataagggctaaat

SEQ ID NO: 35 - DNA, 56 bp, synthetic construct
  source 1..56: mol_type = other DNA
cctacacgacgctcttccgatctnnnnnnacatcaccacagcctcatcctcgattt

SEQ ID NO: 36 - DNA, 56 bp, synthetic construct
  source 1..56: mol_type = other DNA
cctacacgacgctcttccgatctnnnnnnacatcaagggtgagtgtcggaactttg

SEQ ID NO: 37 - DNA, 57 bp, synthetic construct
  source 1..57: mol_type = other DNA
cctacacgacgctcttccgatctnnnnnnacatcagagctgtcatgtgggtgttaga

SEQ ID NO: 38 - DNA, 58 bp, synthetic construct
  source 1..58: mol_type = other DNA
cctacacgacgctcttccgatctnnnnnnacatcagcctggacatcctcaaggataag

SEQ ID NO: 39 - DNA, 58 bp, synthetic construct
  source 1..58: mol_type = other DNA
cctacacgacgctcttccgatctnnnnnnacatcaactaggcgaaggagacactaaga

SEQ ID NO: 40 - DNA, 59 bp, synthetic construct
  source 1..59: mol_type = other DNA
cctacacgacgctcttccgatctnnnnnnacatcatctgcagcatgtgactccatataa

SEQ ID NO: 41 - DNA, 57 bp, synthetic construct
  source 1..57: mol_type = other DNA
cctacacgacgctcttccgatctnnnnnnacatcaagcacagacagacagaggtaga

SEQ ID NO: 42 - DNA, 57 bp, synthetic construct
  source 1..57: mol_type = other DNA
cctacacgacgctcttccgatctnnnnnnacatcagactgcgaggatcacactttct

SEQ ID NO: 43 - DNA, 57 bp, synthetic construct
  source 1..57: mol_type = other DNA
cctacacgacgctcttccgatctnnnnnnacatcagaaaccggaggagcagtacaaa

SEQ ID NO: 44 - DNA, 59 bp, synthetic construct
  source 1..59: mol_type = other DNA
cctacacgacgctcttccgatctnnnnnnacatcacctgcaactacaacctaccctatg

SEQ ID NO: 45 - DNA, 59 bp, synthetic construct
  source 1..59: mol_type = other DNA
cctacacgacgctcttccgatctnnnnnnacatcatagcacagggaatttagcgatagg

SEQ ID NO: 46 - DNA, 59 bp, synthetic construct
  source 1..59: mol_type = other DNA
cctacacgacgctcttccgatctnnnnnnacatcaccgaagcggactactatgctaaag

SEQ ID NO: 47 - DNA, 57 bp, synthetic construct
  source 1..57: mol_type = other DNA
cctacacgacgctcttccgatctnnnnnnacatcagaggaaggtgggtttggttagt

SEQ ID NO: 48 - DNA, 56 bp, synthetic construct
  source 1..56: mol_type = other DNA
cctacacgacgctcttccgatctnnnnnnacatcaacggtgccctacatgctaaat

SEQ ID NO: 49 - DNA, 59 bp, synthetic construct
  source 1..59: mol_type = other DNA
cctacacgacgctcttccgatctnnnnnnacatcattggactgaagagggatgagattg

SEQ ID NO: 50 - DNA, 58 bp, synthetic construct
  source 1..58: mol_type = other DNA
cctacacgacgctcttccgatctnnnnnnacatcagaactcgtgctccactacaagaa

SEQ ID NO: 51 - DNA, 59 bp, synthetic construct
  source 1..59: mol_type = other DNA
cctacacgacgctcttccgatctnnnnnnacatcaggacatgccagatgactatgaaga

SEQ ID NO: 52 - DNA, 59 bp, synthetic construct
  source 1..59: mol_type = other DNA
cctacacgacgctcttccgatctnnnnnnacatcactgtcactctatgcaccactctac

SEQ ID NO: 53 - DNA, 59 bp, synthetic construct
  source 1..59: mol_type = other DNA
cctacacgacgctcttccgatctnnnnnnacatcacctcctatgtgagtcctcctatgt

SEQ ID NO: 54 - DNA, 59 bp, synthetic construct
  source 1..59: mol_type = other DNA
cctacacgacgctcttccgatctnnnnnnacatcagcagaagacactgactgatgaaga

SEQ ID NO: 55 - DNA, 56 bp, synthetic construct
  source 1..56: mol_type = other DNA
cctacacgacgctcttccgatctnnnnnnacatcagtgccctcaacctcactacaa

SEQ ID NO: 56 - DNA, 58 bp, synthetic construct
  source 1..58: mol_type = other DNA
cctacacgacgctcttccgatctnnnnnnacatcacgcaggaggagatccttcattac

SEQ ID NO: 57 - DNA, 59 bp, synthetic construct
  source 1..59: mol_type = other DNA
cctacacgacgctcttccgatctnnnnnnacatcagcaaggtaagttctctcctcttcc

SEQ ID NO: 58 - DNA, 59 bp, synthetic construct
  source 1..59: mol_type = other DNA
cctacacgacgctcttccgatctnnnnnnacatcacacagtgtcttcctcacttcctac

SEQ ID NO: 59 - DNA, 58 bp, synthetic construct
  source 1..58: mol_type = other DNA
cctacacgacgctcttccgatctnnnnnnacatcacatcaccaagaagggccataaga

SEQ ID NO: 60 - DNA, 59 bp, synthetic construct
  source 1..59: mol_type = other DNA
cctacacgacgctcttccgatctnnnnnnacatcagatgcctggtacggagtcaaatac

SEQ ID NO: 61 - DNA, 59 bp, synthetic construct
  source 1..59: mol_type = other DNA
cctacacgacgctcttccgatctnnnnnnacatcagagatccacttcacaggtcatcaa

SEQ ID NO: 62 - DNA, 57 bp, synthetic construct
  source 1..57: mol_type = other DNA
cctacacgacgctcttccgatctnnnnnnacatcaggtcccggtatgcagttctatt

SEQ ID NO: 63 - DNA, 60 bp, synthetic construct
  source 1..60: mol_type = other DNA
cctacacgacgctcttccgatctnnnnnnacatcagacaagaggagatccgcaagaatag

SEQ ID NO: 64 - DNA, 57 bp, synthetic construct
  source 1..57: mol_type = other DNA
cctacacgacgctcttccgatctnnnnnnacatcatgtggtacagccttcagtgttt

SEQ ID NO: 65 - DNA, 58 bp, synthetic construct
  source 1..58: mol_type = other DNA
cctacacgacgctcttccgatctnnnnnnacatcagcttggaagacttggtgtgtttc

SEQ ID NO: 66 - DNA, 57 bp, synthetic construct
  source 1..57: mol_type = other DNA
cctacacgacgctcttccgatctnnnnnnacatcatggctcctctggctgtttattt

SEQ ID NO: 67 - DNA, 59 bp, synthetic construct
  source 1..59: mol_type = other DNA
cctacacgacgctcttccgatctnnnnnnacatcaggaagacccacagatacacagaaa

SEQ ID NO: 68 - DNA, 58 bp, synthetic construct
  source 1..58: mol_type = other DNA
cctacacgacgctcttccgatctnnnnnnacatcaccatggcacatgttggagttaga

SEQ ID NO: 69 - DNA, 59 bp, synthetic construct
  source 1..59: mol_type = other DNA
cctacacgacgctcttccgatctnnnnnnacatcagatccatcactagatcgccctttc

SEQ ID NO: 70 - DNA, 59 bp, synthetic construct
  source 1..59: mol_type = other DNA
cctacacgacgctcttccgatctnnnnnnacatcacttctctaccaccaccttcctttg

SEQ ID NO: 71 - DNA, 59 bp, synthetic construct
  source 1..59: mol_type = other DNA
cctacacgacgctcttccgatctnnnnnnacatcattgactttgctaccctcccattag

SEQ ID NO: 72 - DNA, 59 bp, synthetic construct
  source 1..59: mol_type = other DNA
cctacacgacgctcttccgatctnnnnnnacatcagaacagggttgtactggcttagaa

SEQ ID NO: 73 - DNA, 57 bp, synthetic construct
  source 1..57: mol_type = other DNA
cctacacgacgctcttccgatctnnnnnnacatcacttctttgcctgctgctcatag

SEQ ID NO: 74 - DNA, 58 bp, synthetic construct
  source 1..58: mol_type = other DNA
cctacacgacgctcttccgatctnnnnnnacatcacagccatgaagaagtacctaccc

SEQ ID NO: 75 - DNA, 59 bp, synthetic construct
  source 1..59: mol_type = other DNA
cctacacgacgctcttccgatctnnnnnnacatcaggaagagatccacaagggaagaag

SEQ ID NO: 76 - DNA, 57 bp, synthetic construct
  source 1..57: mol_type = other DNA
cctacacgacgctcttccgatctnnnnnnacatcatgccgctgtgtcctatactttc

SEQ ID NO: 77 - DNA, 59 bp, synthetic construct
  source 1..59: mol_type = other DNA
cctacacgacgctcttccgatctnnnnnnacatcatcacctcttcctcctcctcttatt

SEQ ID NO: 78 - DNA, 58 bp, synthetic construct
  source 1..58: mol_type = other DNA
cctacacgacgctcttccgatctnnnnnnacatcagtggccttcactgtccatctatt

SEQ ID NO: 79 - DNA, 60 bp, synthetic construct
  source 1..60: mol_type = other DNA
cctacacgacgctcttccgatctnnnnnnacatcatcgtcatgttctggtcttcagtatc

SEQ ID NO: 80 - DNA, 59 bp, synthetic construct
  source 1..59: mol_type = other DNA
cctacacgacgctcttccgatctnnnnnnacatcacctcctggaagagctaagaagaac

SEQ ID NO: 81 - DNA, 58 bp, synthetic construct
  source 1..58: mol_type = other DNA
cctacacgacgctcttccgatctnnnnnnacatcaccctggctactgggtcaataatc

SEQ ID NO: 82 - DNA, 59 bp, synthetic construct
  source 1..59: mol_type = other DNA
cctacacgacgctcttccgatctnnnnnnacatcaatgtggtaggagcaaggaatatgg

SEQ ID NO: 83 - DNA, 58 bp, synthetic construct
  source 1..58: mol_type = other DNA
cctacacgacgctcttccgatctnnnnnnacatcatcgggagtgtgagtcctacttta

SEQ ID NO: 84 - DNA, 59 bp, synthetic construct
  source 1..59: mol_type = other DNA
cctacacgacgctcttccgatctnnnnnnacatcagagactgagagagcgagacataga

SEQ ID NO: 85 - DNA, 58 bp, synthetic construct
  source 1..58: mol_type = other DNA
cctacacgacgctcttccgatctnnnnnnacatcagccaaagagaagccaccaataac

SEQ ID NO: 86 - DNA, 59 bp, synthetic construct
  source 1..59: mol_type = other DNA
cctacacgacgctcttccgatctnnnnnnacatcagaggtgtcacggatggaagaataa

SEQ ID NO: 87 - DNA, 57 bp, synthetic construct
  source 1..57: mol_type = other DNA
cctacacgacgctcttccgatctnnnnnnacatcacagaagcaagcggcagataaag

SEQ ID NO: 88 - DNA, 57 bp, synthetic construct
  source 1..57: mol_type = other DNA
cctacacgacgctcttccgatctnnnnnnacatcagtgggagacctggaatcacttt

SEQ ID NO: 89 - DNA, 59 bp, synthetic construct
  source 1..59: mol_type = other DNA
cctacacgacgctcttccgatctnnnnnnacatcaaggagacaccaggagagagaatta

SEQ ID NO: 90 - DNA, 59 bp, synthetic construct
  source 1..59: mol_type = other DNA
cctacacgacgctcttccgatctnnnnnnacatcacctctgatacctcagttcccattc

SEQ ID NO: 91 - DNA, 58 bp, synthetic construct
  source 1..58: mol_type = other DNA
cctacacgacgctcttccgatctnnnnnnacatcacacgcctcctggtaaagacataa

SEQ ID NO: 92 - DNA, 61 bp, synthetic construct
  source 1..61: mol_type = other DNA
cctacacgacgctcttccgatctnnnnnnacatcatgattggagtgaagcacagagtatag

SEQ ID NO: 93 - DNA, 57 bp, synthetic construct
  source 1..57: mol_type = other DNA
cctacacgacgctcttccgatctnnnnnnacatcattcggaagctgtagctgctatg

SEQ ID NO: 94 - DNA, 59 bp, synthetic construct
  source 1..59: mol_type = other DNA
cctacacgacgctcttccgatctnnnnnnacatcactccctgtttctcgtatccacttg

SEQ ID NO: 95 - DNA, 60 bp, synthetic construct
  source 1..60: mol_type = other DNA
cctacacgacgctcttccgatctnnnnnnacatcactattggctgctggcatctttattt

SEQ ID NO: 96 - DNA, 58 bp, synthetic construct
  source 1..58: mol_type = other DNA
cctacacgacgctcttccgatctnnnnnnacatcaggattgagtgaccctgtgaagat

SEQ ID NO: 97 - DNA, 60 bp, synthetic construct
  source 1..60: mol_type = other DNA
cctacacgacgctcttccgatctnnnnnnacatcagggatgagaccattgaaggaagtag

SEQ ID NO: 98 - DNA, 59 bp, synthetic construct
  source 1..59: mol_type = other DNA
cctacacgacgctcttccgatctnnnnnnacatcacacagccaactatgaccaggataa

SEQ ID NO: 99 - DNA, 59 bp, synthetic construct
  source 1..59: mol_type = other DNA
cctacacgacgctcttccgatctnnnnnnacatcaccaaggattccaaggctactctac

SEQ ID NO: 100 - DNA, 58 bp, synthetic construct
  source 1..58: mol_type = other DNA
cctacacgacgctcttccgatctnnnnnnacatcacagtgggaacaggctcagaatta

SEQ ID NO: 101 - DNA, 59 bp, synthetic construct
  source 1..59: mol_type = other DNA
cctacacgacgctcttccgatctnnnnnnacatcagaaggaccctctctgaggaataag

SEQ ID NO: 102 - DNA, 60 bp, synthetic construct
  source 1..60: mol_type = other DNA
cctacacgacgctcttccgatctnnnnnnacatcactgtcacgttgaatgaagaggtaga

SEQ ID NO: 103 - DNA, 55 bp, synthetic construct
  source 1..55: mol_type = other DNA
cctacacgacgctcttccgatctnnnnnnacatcaaatcctggtggtcgcatcaa

SEQ ID NO: 104 - DNA, 58 bp, synthetic construct
  source 1..58: mol_type = other DNA
cctacacgacgctcttccgatctnnnnnnacatcaccatcaggagcactgtccttaaa

SEQ ID NO: 105 - DNA, 59 bp, synthetic construct
  source 1..59: mol_type = other DNA
cctacacgacgctcttccgatctnnnnnnacatcatactatgagaccagcagtctttgc

SEQ ID NO: 106 - DNA, 59 bp, synthetic construct
  source 1..59: mol_type = other DNA
cctacacgacgctcttccgatctnnnnnnacatcaggactactcagtaagcagcaacag

SEQ ID NO: 107 - DNA, 60 bp, synthetic construct
  source 1..60: mol_type = other DNA
cctacacgacgctcttccgatctnnnnnnacatcacactcagaaggatgggaaaggatag

SEQ ID NO: 108 - DNA, 59 bp, synthetic construct
  source 1..59: mol_type = other DNA
cctacacgacgctcttccgatctnnnnnnacatcaggctgagagaagatgagaggaatg

SEQ ID NO: 109 - DNA, 57 bp, synthetic construct
  source 1..57: mol_type = other DNA
cctacacgacgctcttccgatctnnnnnnacatcatgggttgaagagaggttccaag

SEQ ID NO: 110 - DNA, 57 bp, synthetic construct
  source 1..57: mol_type = other DNA
cctacacgacgctcttccgatctnnnnnnacatcaggccgtgatcctgagaactatg

SEQ ID NO: 111 - DNA, 60 bp, synthetic construct
  source 1..60: mol_type = other DNA
cctacacgacgctcttccgatctnnnnnnacatcagagatcaggaggaagaaggaagaac

SEQ ID NO: 112 - DNA, 59 bp, synthetic construct
  source 1..59: mol_type = other DNA
cctacacgacgctcttccgatctnnnnnnacatcacaccttcctctctccgtactctaa

SEQ ID NO: 113 - DNA, 59 bp, synthetic construct
  source 1..59: mol_type = other DNA
cctacacgacgctcttccgatctnnnnnnacatcagcagtagttcccaaccttcctaat

SEQ ID NO: 114 - DNA, 59 bp, synthetic construct
  source 1..59: mol_type = other DNA
cctacacgacgctcttccgatctnnnnnnacatcacaccctggagagtctgactttaac

SEQ ID NO: 115 - DNA, 59 bp, synthetic construct
  source 1..59: mol_type = other DNA
cctacacgacgctcttccgatctnnnnnnacatcatctgcctgctcttaaaggtgtatc

SEQ ID NO: 116 - DNA, 60 bp, synthetic construct
  source 1..60: mol_type = other DNA
cctacacgacgctcttccgatctnnnnnnacatcactacctggctgtcttcatcctattg

SEQ ID NO: 117 - DNA, 56 bp, synthetic construct
  source 1..56: mol_type = other DNA
cctacacgacgctcttccgatctnnnnnnacatcactggtcgccgtcttctgtaaa

SEQ ID NO: 118 - DNA, 57 bp, synthetic construct
  source 1..57: mol_type = other DNA
cctacacgacgctcttccgatctnnnnnnacatcatctttcctggtgccgtgataaa

SEQ ID NO: 119 - DNA, 59 bp, synthetic construct
  source 1..59: mol_type = other DNA
cctacacgacgctcttccgatctnnnnnnacatcaactccgtgaagatccttgtgtatg

SEQ ID NO: 120 - DNA, 58 bp, synthetic construct
  source 1..58: mol_type = other DNA
cctacacgacgctcttccgatctnnnnnnacatcacctttggaggagcagtgtgaata

SEQ ID NO: 121 - DNA, 58 bp, synthetic construct
  source 1..58: mol_type = other DNA
cctacacgacgctcttccgatctnnnnnnacatcacagcagcttgagcacatttcttc

SEQ ID NO: 122 - DNA, 57 bp, synthetic construct
  source 1..57: mol_type = other DNA
cctacacgacgctcttccgatctnnnnnnacatcacggccattcatctctggtacat

SEQ ID NO: 123 - DNA, 59 bp, synthetic construct
  source 1..59: mol_type = other DNA
cctacacgacgctcttccgatctnnnnnnacatcagctctctgttgtccttgtgtatct

SEQ ID NO: 124 - DNA, 57 bp, synthetic construct
  source 1..57: mol_type = other DNA
cctacacgacgctcttccgatctnnnnnnacatcaatggagcgaagtgaggagaaag

SEQ ID NO: 125 - DNA, 56 bp, synthetic construct
  source 1..56: mol_type = other DNA
cctacacgacgctcttccgatctnnnnnnacatcacccagtcaggatgcagaaaga

SEQ ID NO: 126 - DNA, 56 bp, synthetic construct
  source 1..56: mol_type = other DNA
cctacacgacgctcttccgatctnnnnnnacatcagagctccacagcgcttctatt

SEQ ID NO: 127 - DNA, 57 bp, synthetic construct
  source 1..57: mol_type = other DNA
cctacacgacgctcttccgatctnnnnnnacatcaccgtgtggatacaggatgttga

SEQ ID NO: 128 - DNA, 58 bp, synthetic construct
  source 1..58: mol_type = other DNA
cctacacgacgctcttccgatctnnnnnnacatcacccatcttggacctcaacatctc

SEQ ID NO: 129 - DNA, 58 bp, synthetic construct
  source 1..58: mol_type = other DNA
cctacacgacgctcttccgatctnnnnnnacatcagaggagcaggtggaagactattt

SEQ ID NO: 130 - DNA, 57 bp, synthetic construct
  source 1..57: mol_type = other DNA
cctacacgacgctcttccgatctnnnnnnacatcaccacctaacacgggaagagttt

SEQ ID NO: 131 - DNA, 59 bp, synthetic construct
  source 1..59: mol_type = other DNA
cctacacgacgctcttccgatctnnnnnnacatcagcctacctgaagaagaaccatgag

SEQ ID NO: 132 - DNA, 61 bp, synthetic construct
  source 1..61: mol_type = other DNA
cctacacgacgctcttccgatctnnnnnnacatcacagtcccagtttagactctggttatg

SEQ ID NO: 133 - DNA, 57 bp, synthetic construct
  source 1..57: mol_type = other DNA
cctacacgacgctcttccgatctnnnnnnacatcaccagaaggtgatggaacagaca

SEQ ID NO: 134 - DNA, 57 bp, synthetic construct
  source 1..57: mol_type = other DNA
cctacacgacgctcttccgatctnnnnnnacatcaactgcaggatcttcagcaagag

SEQ ID NO: 135 - DNA, 58 bp, synthetic construct
  source 1..58: mol_type = other DNA
cctacacgacgctcttccgatctnnnnnnacatcacaccatgtggttcctggaaattg

SEQ ID NO: 136 - DNA, 58 bp, synthetic construct
  source 1..58: mol_type = other DNA
cctacacgacgctcttccgatctnnnnnnacatcaagagagaaagggagggaagaaga

SEQ ID NO: 137 - DNA, 60 bp, synthetic construct
  source 1..60: mol_type = other DNA
cctacacgacgctcttccgatctnnnnnnacatcacctggaagtccaacagtatgaaaga

SEQ ID NO: 138 - DNA, 56 bp, synthetic construct
  source 1..56: mol_type = other DNA
cctacacgacgctcttccgatctnnnnnnacatcaatgttcagcctctgccaatct

SEQ ID NO: 139 - DNA, 59 bp, synthetic construct
  source 1..59: mol_type = other DNA
cctacacgacgctcttccgatctnnnnnnacatcagggcttatgactggtcagagtttc

SEQ ID NO: 140 - DNA, 58 bp, synthetic construct
  source 1..58: mol_type = other DNA
cctacacgacgctcttccgatctnnnnnnacatcaggcatcagagacaccaattacct

SEQ ID NO: 141 - DNA, 60 bp, synthetic construct
  source 1..60: mol_type = other DNA
cctacacgacgctcttccgatctnnnnnnacatcaccctgaccactatgaaacagactac

SEQ ID NO: 142 - DNA, 57 bp, synthetic construct
  source 1..57: mol_type = other DNA
cctacacgacgctcttccgatctnnnnnnacatcagtcagctacatgcccacctatt

SEQ ID NO: 143 - DNA, 59 bp, synthetic construct
  source 1..59: mol_type = other DNA
cctacacgacgctcttccgatctnnnnnnacatcagtgaaggccaaactccatgtaaag

SEQ ID NO: 144 - DNA, 57 bp, synthetic construct
  source 1..57: mol_type = other DNA
cctacacgacgctcttccgatctnnnnnnacatcacatcccatcgggttcccataaa

SEQ ID NO: 145 - DNA, 59 bp, synthetic construct
  source 1..59: mol_type = other DNA
cctacacgacgctcttccgatctnnnnnnacatcagtgtctcagccactttccaatttc

SEQ ID NO: 146 - DNA, 59 bp, synthetic construct
  source 1..59: mol_type = other DNA
cctacacgacgctcttccgatctnnnnnnacatcaaccggatccagaaggagaaataac

SEQ ID NO: 147 - DNA, 59 bp, synthetic construct
  source 1..59: mol_type = other DNA
cctacacgacgctcttccgatctnnnnnnacatcacaggtgagagagttgctcaagaag

SEQ ID NO: 148 - DNA, 59 bp, synthetic construct
  source 1..59: mol_type = other DNA
cctacacgacgctcttccgatctnnnnnnacatcactcttaggccaaggtgaacagtaa

SEQ ID NO: 149 - DNA, 57 bp, synthetic construct
  source 1..57: mol_type = other DNA
cctacacgacgctcttccgatctnnnnnnacatcattggtcctctctttggcacttt

SEQ ID NO: 150 - DNA, 60 bp, synthetic construct
  source 1..60: mol_type = other DNA
cctacacgacgctcttccgatctnnnnnnacatcacctcatactgtaccagcacacttta

SEQ ID NO: 151 - DNA, 59 bp, synthetic construct
  source 1..59: mol_type = other DNA
cctacacgacgctcttccgatctnnnnnnacatcaggagtatcgcctgtttctcagtag

SEQ ID NO: 152 - DNA, 60 bp, synthetic construct
  source 1..60: mol_type = other DNA
cctacacgacgctcttccgatctnnnnnnacatcactccctccagaaacaataacctacc

SEQ ID NO: 153 - DNA, 58 bp, synthetic construct
  source 1..58: mol_type = other DNA
cctacacgacgctcttccgatctnnnnnnacatcattcagtccttctgcagacctttc

SEQ ID NO: 154 - DNA, 58 bp, synthetic construct
  source 1..58: mol_type = other DNA
cctacacgacgctcttccgatctnnnnnnacatcatctcccttctcccactgatagtc

SEQ ID NO: 155 - DNA, 59 bp, synthetic construct
  source 1..59: mol_type = other DNA
cctacacgacgctcttccgatctnnnnnnacatcacttctcatctgcatctcccttctc

SEQ ID NO: 156 - DNA, 58 bp, synthetic construct
  source 1..58: mol_type = other DNA
cctacacgacgctcttccgatctnnnnnnacatcagtccctccatcagggtcaataat

SEQ ID NO: 157 - DNA, 57 bp, synthetic construct
  source 1..57: mol_type = other DNA
cctacacgacgctcttccgatctnnnnnnacatcacttgaaagcagaggccagtaga

SEQ ID NO: 158 - DNA, 56 bp, synthetic construct
  source 1..56: mol_type = other DNA
cctacacgacgctcttccgatctnnnnnnacatcaacagtggcttcctggctattc

SEQ ID NO: 159 - DNA, 58 bp, synthetic construct
  source 1..58: mol_type = other DNA
cctacacgacgctcttccgatctnnnnnnacatcaggacctcctgagatgcagataga

SEQ ID NO: 160 - DNA, 58 bp, synthetic construct
  source 1..58: mol_type = other DNA
cctacacgacgctcttccgatctnnnnnnacatcacccaaggtctcctatccctatgt

SEQ ID NO: 161 - DNA, 57 bp, synthetic construct
  source 1..57: mol_type = other DNA
cctacacgacgctcttccgatctnnnnnnacatcaactcttggccgtctcagatttc

SEQ ID NO: 162 - DNA, 59 bp, synthetic construct
  source 1..59: mol_type = other DNA
cctacacgacgctcttccgatctnnnnnnacatcactccagaccttggagattgacttg

SEQ ID NO: 163 - DNA, 59 bp, synthetic construct
  source 1..59: mol_type = other DNA
cctacacgacgctcttccgatctnnnnnnacatcacaccacctttccaattggcttatg

SEQ ID NO: 164 - DNA, 59 bp, synthetic construct
  source 1..59: mol_type = other DNA
cctacacgacgctcttccgatctnnnnnnacatcaccatcattacctggccctaattct

SEQ ID NO: 165 - DNA, 58 bp, synthetic construct
  source 1..58: mol_type = other DNA
cctacacgacgctcttccgatctnnnnnnacatcacctcgtgccaaatggttacaaag

SEQ ID NO: 166 - DNA, 59 bp, synthetic construct
  source 1..59: mol_type = other DNA
cctacacgacgctcttccgatctnnnnnnacatcagcaataagtcagctccctctgaaa

SEQ ID NO: 167 - DNA, 59 bp, synthetic construct
  source 1..59: mol_type = other DNA
cctacacgacgctcttccgatctnnnnnnacatcaacgcctatggttcctactgttatt

SEQ ID NO: 168 - DNA, 58 bp, synthetic construct
  source 1..58: mol_type = other DNA
cctacacgacgctcttccgatctnnnnnnacatcagagtagaaaggccgagtgagatg

SEQ ID NO: 169 - DNA, 58 bp, synthetic construct
  source 1..58: mol_type = other DNA
cctacacgacgctcttccgatctnnnnnnacatcagtgtccacctcccgtatctattg

SEQ ID NO: 170 - DNA, 57 bp, synthetic construct
  source 1..57: mol_type = other DNA
cctacacgacgctcttccgatctnnnnnnacatcacccataggcaatacacgctaca

SEQ ID NO: 171 - DNA, 57 bp, synthetic construct
  source 1..57: mol_type = other DNA
cctacacgacgctcttccgatctnnnnnnacatcagcacagctatcacggcctataa

SEQ ID NO: 172 - DNA, 59 bp, synthetic construct
  source 1..59: mol_type = other DNA
cctacacgacgctcttccgatctnnnnnnacatcatctagtttcctggtctggagaaga

SEQ ID NO: 173 - DNA, 57 bp, synthetic construct
  source 1..57: mol_type = other DNA
cctacacgacgctcttccgatctnnnnnnacatcacttgctgtttcagtggcttgac

SEQ ID NO: 174 - DNA, 59 bp, synthetic construct
  source 1..59: mol_type = other DNA
cctacacgacgctcttccgatctnnnnnnacatcacaagagctccagagagaagtcaag

SEQ ID NO: 175 - DNA, 57 bp, synthetic construct
  source 1..57: mol_type = other DNA
cctacacgacgctcttccgatctnnnnnnacatcatctgggatagctgcagattacg

SEQ ID NO: 176 - DNA, 58 bp, synthetic construct
  source 1..58: mol_type = other DNA
cctacacgacgctcttccgatctnnnnnnacatcactcatccatcactcgtggtcttc

SEQ ID NO: 177 - DNA, 59 bp, synthetic construct
  source 1..59: mol_type = other DNA
cctacacgacgctcttccgatctnnnnnnacatcacaagaccgagctaaccaacataga

SEQ ID NO: 178 - DNA, 59 bp, synthetic construct
  source 1..59: mol_type = other DNA
cctacacgacgctcttccgatctnnnnnnacatcagttcttctcaggagcctcttcatc

SEQ ID NO: 179 - DNA, 57 bp, synthetic construct
  source 1..57: mol_type = other DNA
cctacacgacgctcttccgatctnnnnnnacatcaaggacggcgtctattacctcta

SEQ ID NO: 180 - DNA, 60 bp, synthetic construct
  source 1..60: mol_type = other DNA
cctacacgacgctcttccgatctnnnnnnacatcacctatgtctcagcctcttctcattc

SEQ ID NO: 181 - DNA, 57 bp, synthetic construct
  source 1..57: mol_type = other DNA
cctacacgacgctcttccgatctnnnnnnacatcacacactgccgcttcctctataa

SEQ ID NO: 182 - DNA, 58 bp, synthetic construct
  source 1..58: mol_type = other DNA
cctacacgacgctcttccgatctnnnnnnacatcagccagccaagaagaaatgtgaag

SEQ ID NO: 183 - DNA, 58 bp, synthetic construct
  source 1..58: mol_type = other DNA
cctacacgacgctcttccgatctnnnnnnacatcacagttgttgctgtccgtgttatg

SEQ ID NO: 184 - DNA, 59 bp, synthetic construct
  source 1..59: mol_type = other DNA
cctacacgacgctcttccgatctnnnnnnacatcagcctaccctagcatacagcattac

SEQ ID NO: 185 - DNA, 57 bp, synthetic construct
  source 1..57: mol_type = other DNA
cctacacgacgctcttccgatctnnnnnnacatcagtgggttcacagtttccgtttc

SEQ ID NO: 186 - DNA, 59 bp, synthetic construct
  source 1..59: mol_type = other DNA
cctacacgacgctcttccgatctnnnnnnacatcactgctatgacgtgggtcttctatc

SEQ ID NO: 187 - DNA, 59 bp, synthetic construct
  source 1..59: mol_type = other DNA
cctacacgacgctcttccgatctnnnnnnacatcaggaaccaaggatcagactgagaaa

SEQ ID NO: 188 - DNA, 59 bp, synthetic construct
  source 1..59: mol_type = other DNA
cctacacgacgctcttccgatctnnnnnnacatcacttcaggaccaaccctaacatctc

SEQ ID NO: 189 - DNA, 59 bp, synthetic construct
  source 1..59: mol_type = other DNA
cctacacgacgctcttccgatctnnnnnnacatcacagacttctactgcgattctcctg

SEQ ID NO: 190 - DNA, 59 bp, synthetic construct
  source 1..59: mol_type = other DNA
cctacacgacgctcttccgatctnnnnnnacatcagacctggcaacaaggaacatattg

SEQ ID NO: 191 - DNA, 59 bp, synthetic construct
  source 1..59: mol_type = other DNA
cctacacgacgctcttccgatctnnnnnnacatcagggctatcctgatctgtgcatatt

SEQ ID NO: 192 - DNA, 59 bp, synthetic construct
  source 1..59: mol_type = other DNA
cctacacgacgctcttccgatctnnnnnnacatcacttggcttacgatgttgtggaatg

SEQ ID NO: 193 - DNA, 56 bp, synthetic construct
  source 1..56: mol_type = other DNA
cctacacgacgctcttccgatctnnnnnnacatcacagccaatgtgaatgcagacc

SEQ ID NO: 194 - DNA, 58 bp, synthetic construct
  source 1..58: mol_type = other DNA
cctacacgacgctcttccgatctnnnnnnacatcagctctgcctaccctcatcaatta

SEQ ID NO: 195 - DNA, 57 bp, synthetic construct
  source 1..57: mol_type = other DNA
cctacacgacgctcttccgatctnnnnnnacatcattactttgaagaccggcaggag

SEQ ID NO: 196 - DNA, 59 bp, synthetic construct
  source 1..59: mol_type = other DNA
cctacacgacgctcttccgatctnnnnnnacatcagtacctctacgtgctggagtttag

SEQ ID NO: 197 - DNA, 59 bp, synthetic construct
  source 1..59: mol_type = other DNA
cctacacgacgctcttccgatctnnnnnnacatcacagcccagacatctaccagttaat

SEQ ID NO: 198 - DNA, 59 bp, synthetic construct
  source 1..59: mol_type = other DNA
cctacacgacgctcttccgatctnnnnnnacatcagccctctgtctttgctctactatg

SEQ ID NO: 199 - DNA, 58 bp, synthetic construct
  source 1..58: mol_type = other DNA
cctacacgacgctcttccgatctnnnnnnacatcagagggagacagggaaacattcat

SEQ ID NO: 200 - DNA, 59 bp, synthetic construct
  source 1..59: mol_type = other DNA
cctacacgacgctcttccgatctnnnnnnacatcactctgaggaaggcatacagttcag

SEQ ID NO: 201 - DNA, 59 bp, synthetic construct
  source 1..59: mol_type = other DNA
cctacacgacgctcttccgatctnnnnnnacatcagttctctgggaaatcgtggaaatg

SEQ ID NO: 202 - DNA, 59 bp, synthetic construct
  source 1..59: mol_type = other DNA
cctacacgacgctcttccgatctnnnnnnacatcactttactggaactggagcagagag

SEQ ID NO: 203 - DNA, 57 bp, synthetic construct
  source 1..57: mol_type = other DNA
cctacacgacgctcttccgatctnnnnnnacatcatccagcgactcttggagataga

SEQ ID NO: 204 - DNA, 59 bp, synthetic construct
  source 1..59: mol_type = other DNA
cctacacgacgctcttccgatctnnnnnnacatcaggagatggtgaaagaggtgaaaga

SEQ ID NO: 205 - DNA, 58 bp, synthetic construct
  source 1..58: mol_type = other DNA
cctacacgacgctcttccgatctnnnnnnacatcaccgcaatgaagaccctgatagat

SEQ ID NO: 206 - DNA, 56 bp, synthetic construct
  source 1..56: mol_type = other DNA
cctacacgacgctcttccgatctnnnnnnacatcatgccacggagacaaagaagaa

SEQ ID NO: 207 - DNA, 59 bp, synthetic construct
  source 1..59: mol_type = other DNA
cctacacgacgctcttccgatctnnnnnnacatcactagttaagcgaggagctgaagtg

SEQ ID NO: 208 - DNA, 57 bp, synthetic construct
  source 1..57: mol_type = other DNA
cctacacgacgctcttccgatctnnnnnnacatcacaggacccattctgtgggtaaa

SEQ ID NO: 209 - DNA, 58 bp, synthetic construct
  source 1..58: mol_type = other DNA
cctacacgacgctcttccgatctnnnnnnacatcagcatcacttggaagcagcataag

SEQ ID NO: 210 - DNA, 59 bp, synthetic construct
  source 1..59: mol_type = other DNA
cctacacgacgctcttccgatctnnnnnnacatcactgctgagagtggtatcctgtatg

SEQ ID NO: 211 - DNA, 58 bp, synthetic construct
  source 1..58: mol_type = other DNA
cctacacgacgctcttccgatctnnnnnnacatcaggcatgataaggcacaccataag

SEQ ID NO: 212 - DNA, 57 bp, synthetic construct
  source 1..57: mol_type = other DNA
cctacacgacgctcttccgatctnnnnnnacatcatctgtggcagcagtgtgtatag

SEQ ID NO: 213 - DNA, 58 bp, synthetic construct
  source 1..58: mol_type = other DNA
cctacacgacgctcttccgatctnnnnnnacatcagacaaggagaggagcttgctaaa

SEQ ID NO: 214 - DNA, 57 bp, synthetic construct
  source 1..57: mol_type = other DNA
cctacacgacgctcttccgatctnnnnnnacatcagggcgccatactcttggataaa

SEQ ID NO: 215 - DNA, 57 bp, synthetic construct
  source 1..57: mol_type = other DNA
cctacacgacgctcttccgatctnnnnnnacatcaacctatgagcccgaccctatta

SEQ ID NO: 216 - DNA, 60 bp, synthetic construct
  source 1..60: mol_type = other DNA
cctacacgacgctcttccgatctnnnnnnacatcactacgactgttgcctctcgtacata

SEQ ID NO: 217 - DNA, 60 bp, synthetic construct
  source 1..60: mol_type = other DNA
cctacacgacgctcttccgatctnnnnnnacatcagtgtagaagacacagctccagttag

SEQ ID NO: 218 - DNA, 59 bp, synthetic construct
  source 1..59: mol_type = other DNA
cctacacgacgctcttccgatctnnnnnnacatcagagaagaaggaagttgtggaggag

SEQ ID NO: 219 - DNA, 59 bp, synthetic construct
  source 1..59: mol_type = other DNA
cctacacgacgctcttccgatctnnnnnnacatcagagaatgatgtgtcctcccagaaa

SEQ ID NO: 220 - DNA, 61 bp, synthetic construct
  source 1..61: mol_type = other DNA
cctacacgacgctcttccgatctnnnnnnacatcatctctctctctctctctctctctctc

SEQ ID NO: 221 - DNA, 57 bp, synthetic construct
  source 1..57: mol_type = other DNA
cctacacgacgctcttccgatctnnnnnnacatcaatgatccagtgcccaagaagag

SEQ ID NO: 222 - DNA, 59 bp, synthetic construct
  source 1..59: mol_type = other DNA
cctacacgacgctcttccgatctnnnnnnacatcagtatagccaggtggtcacctattc

SEQ ID NO: 223 - DNA, 59 bp, synthetic construct
  source 1..59: mol_type = other DNA
cctacacgacgctcttccgatctnnnnnnacatcaaggctagtcggtatcacctctatt

SEQ ID NO: 224 - DNA, 59 bp, synthetic construct
  source 1..59: mol_type = other DNA
cctacacgacgctcttccgatctnnnnnnacatcaggtctccaggatctaggtgtaaga

SEQ ID NO: 225 - DNA, 58 bp, synthetic construct
  source 1..58: mol_type = other DNA
cctacacgacgctcttccgatctnnnnnnacatcagcctgagcctaatccttcttctt

SEQ ID NO: 226 - DNA, 58 bp, synthetic construct
  source 1..58: mol_type = other DNA
cctacacgacgctcttccgatctnnnnnnacatcagcttattgtgggcatcctgtttc

SEQ ID NO: 227 - DNA, 59 bp, synthetic construct
  source 1..59: mol_type = other DNA
cctacacgacgctcttccgatctnnnnnnacatcaagctcatcttcggcttcatctaac

SEQ ID NO: 228 - DNA, 61 bp, synthetic construct
  source 1..61: mol_type = other DNA
cctacacgacgctcttccgatctnnnnnnacatcagggactgaagtcctagaagagagtag

SEQ ID NO: 229 - DNA, 57 bp, synthetic construct
  source 1..57: mol_type = other DNA
cctacacgacgctcttccgatctnnnnnnacatcatggtgggagcaagtgtgataag

SEQ ID NO: 230 - DNA, 60 bp, synthetic construct
  source 1..60: mol_type = other DNA
cctacacgacgctcttccgatctnnnnnnacatcaggatagagagaagcaggagcaatac

SEQ ID NO: 231 - DNA, 59 bp, synthetic construct
  source 1..59: mol_type = other DNA
cctacacgacgctcttccgatctnnnnnnacatcatggagtcaagctcactgacaataa

SEQ ID NO: 232 - DNA, 59 bp, synthetic construct
  source 1..59: mol_type = other DNA
cctacacgacgctcttccgatctnnnnnnacatcagtccagcaggtctttaccagtatt

SEQ ID NO: 233 - DNA, 59 bp, synthetic construct
  source 1..59: mol_type = other DNA
cctacacgacgctcttccgatctnnnnnnacatcagtctcctgttctgggacctttatc

SEQ ID NO: 234 - DNA, 58 bp, synthetic construct
  source 1..58: mol_type = other DNA
cctacacgacgctcttccgatctnnnnnnacatcacagatgcgtgagatggaagagaa

SEQ ID NO: 235 - DNA, 55 bp, synthetic construct
  source 1..55: mol_type = other DNA
cctacacgacgctcttccgatctnnnnnnacatcacgcttggctcgcattcattt

SEQ ID NO: 236 - DNA, 57 bp, synthetic construct
  source 1..57: mol_type = other DNA
cctacacgacgctcttccgatctnnnnnnacatcacccatccactttccttcttcct

SEQ ID NO: 237 - DNA, 59 bp, synthetic construct
  source 1..59: mol_type = other DNA
cctacacgacgctcttccgatctnnnnnnacatcagagtgtgtcacctacatccagaac

SEQ ID NO: 238 - DNA, 57 bp, synthetic construct
  source 1..57: mol_type = other DNA
cctacacgacgctcttccgatctnnnnnnacatcaggccagttcactctgggaaata

SEQ ID NO: 239 - DNA, 55 bp, synthetic construct
  source 1..55: mol_type = other DNA
cctacacgacgctcttccgatctnnnnnnacatcaagcccaaggtcaaccagaaa

SEQ ID NO: 240 - DNA, 59 bp, synthetic construct
  source 1..59: mol_type = other DNA
cctacacgacgctcttccgatctnnnnnnacatcaccagatgtgtgttccagaggatag

SEQ ID NO: 241 - DNA, 59 bp, synthetic construct
  source 1..59: mol_type = other DNA
cctacacgacgctcttccgatctnnnnnnacatcatggaagaccttgtgtcctgtttag

SEQ ID NO: 242 - DNA, 59 bp, synthetic construct
  source 1..59: mol_type = other DNA
cctacacgacgctcttccgatctnnnnnnacatcaggaagaaagcagggaggaagtaag

SEQ ID NO: 243 - DNA, 55 bp, synthetic construct
  source 1..55: mol_type = other DNA
cctacacgacgctcttccgatctnnnnnnacatcatccgctccacaaacgagaaa

SEQ ID NO: 244 - DNA, 59 bp, synthetic construct
  source 1..59: mol_type = other DNA
cctacacgacgctcttccgatctnnnnnnacatcagagatgatggagccctgtgaatac

SEQ ID NO: 245 - DNA, 57 bp, synthetic construct
  source 1..57: mol_type = other DNA
cctacacgacgctcttccgatctnnnnnnacatcatggtgtgtgacgttcccattag

SEQ ID NO: 246 - DNA, 58 bp, synthetic construct
  source 1..58: mol_type = other DNA
cctacacgacgctcttccgatctnnnnnnacatcaggccaaagttcctgacttgtttg

SEQ ID NO: 247 - DNA, 57 bp, synthetic construct
  source 1..57: mol_type = other DNA
cctacacgacgctcttccgatctnnnnnnacatcatggacttccggcatcacaatta

SEQ ID NO: 248 - DNA, 57 bp, synthetic construct
  source 1..57: mol_type = other DNA
cctacacgacgctcttccgatctnnnnnnacatcacaagtcctttaccgcctgaaga

SEQ ID NO: 249 - DNA, 59 bp, synthetic construct
  source 1..59: mol_type = other DNA
cctacacgacgctcttccgatctnnnnnnacatcactatcggctcactcagttccattt

SEQ ID NO: 250 - DNA, 60 bp, synthetic construct
  source 1..60: mol_type = other DNA
cctacacgacgctcttccgatctnnnnnnacatcatcctcccaatgtcaagttcctttat

SEQ ID NO: 251 - DNA, 59 bp, synthetic construct
  source 1..59: mol_type = other DNA
cctacacgacgctcttccgatctnnnnnnacatcactcctgagcaggatggagaattac

SEQ ID NO: 252 - DNA, 57 bp, synthetic construct
  source 1..57: mol_type = other DNA
cctacacgacgctcttccgatctnnnnnnacatcactgccggctatccagacaatta

SEQ ID NO: 253 - DNA, 59 bp, synthetic construct
  source 1..59: mol_type = other DNA
cctacacgacgctcttccgatctnnnnnnacatcatgggtcaaagccacagatgtatta

SEQ ID NO: 254 - DNA, 58 bp, synthetic construct
  source 1..58: mol_type = other DNA
cctacacgacgctcttccgatctnnnnnnacatcagctgactcttgtcctctggattt

SEQ ID NO: 255 - DNA, 57 bp, synthetic construct
  source 1..57: mol_type = other DNA
cctacacgacgctcttccgatctnnnnnnacatcaaacctgtacagacgctggaatc

SEQ ID NO: 256 - DNA, 58 bp, synthetic construct
  source 1..58: mol_type = other DNA
cctacacgacgctcttccgatctnnnnnnacatcaccggcatatacgagtgtgaatct

SEQ ID NO: 257 - DNA, 59 bp, synthetic construct
  source 1..59: mol_type = other DNA
cctacacgacgctcttccgatctnnnnnnacatcaaaacctcagacaaagcgtcaaatc

SEQ ID NO: 258 - DNA, 57 bp, synthetic construct
  source 1..57: mol_type = other DNA
cctacacgacgctcttccgatctnnnnnnacatcaacagacagtgggaagtctgttg

SEQ ID NO: 259 - DNA, 57 bp, synthetic construct
  source 1..57: mol_type = other DNA
cctacacgacgctcttccgatctnnnnnnacatcaatggtgctggtgtggagattag

SEQ ID NO: 260 - DNA, 59 bp, synthetic construct
  source 1..59: mol_type = other DNA
cctacacgacgctcttccgatctnnnnnnacatcaaggagagtggaacatctgcaatac

SEQ ID NO: 261 - DNA, 57 bp, synthetic construct
  source 1..57: mol_type = other DNA
cctacacgacgctcttccgatctnnnnnnacatcataggcaatgatgagccctacac

SEQ ID NO: 262 - DNA, 58 bp, synthetic construct
  source 1..58: mol_type = other DNA
cctacacgacgctcttccgatctnnnnnnacatcatagccaagcgagatgcctttatc

SEQ ID NO: 263 - DNA, 61 bp, synthetic construct
  source 1..61: mol_type = other DNA
cctacacgacgctcttccgatctnnnnnnacatcagagcttgcagaagagctatggattac

SEQ ID NO: 264 - DNA, 59 bp, synthetic construct
  source 1..59: mol_type = other DNA
cctacacgacgctcttccgatctnnnnnnacatcaccatgctgccttgttgaaagatac

SEQ ID NO: 265 - DNA, 59 bp, synthetic construct
  source 1..59: mol_type = other DNA
cctacacgacgctcttccgatctnnnnnnacatcagaccctgaatcctttcctctcaag

SEQ ID NO: 266 - DNA, 55 bp, synthetic construct
  source 1..55: mol_type = other DNA
cctacacgacgctcttccgatctnnnnnnacatcatgggctcttgcctgattctt

SEQ ID NO: 267 - DNA, 57 bp, synthetic construct
  source 1..57: mol_type = other DNA
cctacacgacgctcttccgatctnnnnnnacatcagaagttgggaccctgtcaagaa

SEQ ID NO: 268 - DNA, 58 bp, synthetic construct
  source 1..58: mol_type = other DNA
cctacacgacgctcttccgatctnnnnnnacatcacagcaatgggtggagatgaaatg

SEQ ID NO: 269 - DNA, 60 bp, synthetic construct
  source 1..60: mol_type = other DNA
cctacacgacgctcttccgatctnnnnnnacatcagatggcctggatctcatcagtattt

SEQ ID NO: 270 - DNA, 57 bp, synthetic construct
  source 1..57: mol_type = other DNA
cctacacgacgctcttccgatctnnnnnnacatcacagaaagccatcgaggagaaca

SEQ ID NO: 271 - DNA, 60 bp, synthetic construct
  source 1..60: mol_type = other DNA
cctacacgacgctcttccgatctnnnnnnacatcagtatcttgaagaccctgccctattc

SEQ ID NO: 272 - DNA, 60 bp, synthetic construct
  source 1..60: mol_type = other DNA
cctacacgacgctcttccgatctnnnnnnacatcagattgatcaacgcggatggtttatt

SEQ ID NO: 273 - DNA, 59 bp, synthetic construct
  source 1..59: mol_type = other DNA
cctacacgacgctcttccgatctnnnnnnacatcacttctctcccagtaccaccatttc

SEQ ID NO: 274 - DNA, 59 bp, synthetic construct
  source 1..59: mol_type = other DNA
cctacacgacgctcttccgatctnnnnnnacatcactgggaactctcgctgctattatc

SEQ ID NO: 275 - DNA, 59 bp, synthetic construct
  source 1..59: mol_type = other DNA
cctacacgacgctcttccgatctnnnnnnacatcagccctggaccaattgtaccttatc

SEQ ID NO: 276 - DNA, 57 bp, synthetic construct
  source 1..57: mol_type = other DNA
cctacacgacgctcttccgatctnnnnnnacatcagagctcggccaagtggatataa

SEQ ID NO: 277 - DNA, 59 bp, synthetic construct
  source 1..59: mol_type = other DNA
cctacacgacgctcttccgatctnnnnnnacatcactttgtgcaaccagctccatattc

SEQ ID NO: 278 - DNA, 58 bp, synthetic construct
  source 1..58: mol_type = other DNA
cctacacgacgctcttccgatctnnnnnnacatcagaatgatgcctctctgcctctac

SEQ ID NO: 279 - DNA, 59 bp, synthetic construct
  source 1..59: mol_type = other DNA
cctacacgacgctcttccgatctnnnnnnacatcacgttgtgtttgcttaaccgtaact

SEQ ID NO: 280 - DNA, 59 bp, synthetic construct
  source 1..59: mol_type = other DNA
cctacacgacgctcttccgatctnnnnnnacatcaactgtgctgatgtggaagtgatag

SEQ ID NO: 281 - DNA, 56 bp, synthetic construct
  source 1..56: mol_type = other DNA
cctacacgacgctcttccgatctnnnnnnacatcatgggcaggcagtgaagataaa

SEQ ID NO: 282 - DNA, 59 bp, synthetic construct
  source 1..59: mol_type = other DNA
cctacacgacgctcttccgatctnnnnnnacatcagacattcctgcgagcttagtgata

SEQ ID NO: 283 - DNA, 59 bp, synthetic construct
  source 1..59: mol_type = other DNA
cctacacgacgctcttccgatctnnnnnnacatcagaagatactgaagagcggcaagtc

SEQ ID NO: 284 - DNA, 59 bp, synthetic construct
  source 1..59: mol_type = other DNA
cctacacgacgctcttccgatctnnnnnnacatcacccaagtaacggagaaagaagaca

SEQ ID NO: 285 - DNA, 60 bp, synthetic construct
  source 1..60: mol_type = other DNA
cctacacgacgctcttccgatctnnnnnnacatcacgaggaaccctagtgataaggaatg

SEQ ID NO: 286 - DNA, 59 bp, synthetic construct
  source 1..59: mol_type = other DNA
cctacacgacgctcttccgatctnnnnnnacatcaacatctcggtcatcatagcacatc

SEQ ID NO: 287 - DNA, 58 bp, synthetic construct
  source 1..58: mol_type = other DNA
cctacacgacgctcttccgatctnnnnnnacatcaccatcactgtcctcactgtcttc

SEQ ID NO: 288 - DNA, 59 bp, synthetic construct
  source 1..59: mol_type = other DNA
cctacacgacgctcttccgatctnnnnnnacatcaccatcttcatcgtgggaaacaaag

SEQ ID NO: 289 - DNA, 61 bp, synthetic construct
  source 1..61: mol_type = other DNA
cctacacgacgctcttccgatctnnnnnnacatcagatggagattgaggacagaagatgag

SEQ ID NO: 290 - DNA, 59 bp, synthetic construct
  source 1..59: mol_type = other DNA
cctacacgacgctcttccgatctnnnnnnacatcagatgtggaaggagacgaggattac

SEQ ID NO: 291 - DNA, 59 bp, synthetic construct
  source 1..59: mol_type = other DNA
cctacacgacgctcttccgatctnnnnnnacatcacttcactcagacccaaggactatg

SEQ ID NO: 292 - DNA, 59 bp, synthetic construct
  source 1..59: mol_type = other DNA
cctacacgacgctcttccgatctnnnnnnacatcactctccttgctactgattcctctg

SEQ ID NO: 293 - DNA, 60 bp, synthetic construct
  source 1..60: mol_type = other DNA
cctacacgacgctcttccgatctnnnnnnacatcatggcttagggagtgtggttaaatag

SEQ ID NO: 294 - DNA, 61 bp, synthetic construct
  source 1..61: mol_type = other DNA
cctacacgacgctcttccgatctnnnnnnacatcagagattgcctctggtcaggataatag

SEQ ID NO: 295 - DNA, 59 bp, synthetic construct
  source 1..59: mol_type = other DNA
cctacacgacgctcttccgatctnnnnnnacatcactagggatctgcaagacagacaag

SEQ ID NO: 296 - DNA, 58 bp, synthetic construct
  source 1..58: mol_type = other DNA
cctacacgacgctcttccgatctnnnnnnacatcaggcagaacttacagccacataga

SEQ ID NO: 297 - DNA, 57 bp, synthetic construct
  source 1..57: mol_type = other DNA
cctacacgacgctcttccgatctnnnnnnacatcagacgagaggaagtgtggtgaaa

SEQ ID NO: 298 - DNA, 58 bp, synthetic construct
  source 1..58: mol_type = other DNA
cctacacgacgctcttccgatctnnnnnnacatcaagatggctcctctctctcataca

SEQ ID NO: 299 - DNA, 58 bp, synthetic construct
  source 1..58: mol_type = other DNA
cctacacgacgctcttccgatctnnnnnnacatcatcatggtcatcagaaccctttcc

SEQ ID NO: 300 - DNA, 56 bp, synthetic construct
  source 1..56: mol_type = other DNA
cctacacgacgctcttccgatctnnnnnnacatcaacagggccaaggaacctattt

SEQ ID NO: 301 - DNA, 59 bp, synthetic construct
  source 1..59: mol_type = other DNA
cctacacgacgctcttccgatctnnnnnnacatcacacctttacggcttcccagaatta

SEQ ID NO: 302 - DNA, 58 bp, synthetic construct
  source 1..58: mol_type = other DNA
cctacacgacgctcttccgatctnnnnnnacatcaccgaaactgatgctgtggataga

SEQ ID NO: 303 - DNA, 57 bp, synthetic construct
  source 1..57: mol_type = other DNA
cctacacgacgctcttccgatctnnnnnnacatcactgtggtgtccagtgcatatct

SEQ ID NO: 304 - DNA, 57 bp, synthetic construct
  source 1..57: mol_type = other DNA
cctacacgacgctcttccgatctnnnnnnacatcaagcagagaggctgggaataatg

SEQ ID NO: 305 - DNA, 58 bp, synthetic construct
  source 1..58: mol_type = other DNA
cctacacgacgctcttccgatctnnnnnnacatcaggtgacagctctatccggtattt

SEQ ID NO: 306 - DNA, 59 bp, synthetic construct
  source 1..59: mol_type = other DNA
cctacacgacgctcttccgatctnnnnnnacatcaggacaactgagagttccacagaag

SEQ ID NO: 307 - DNA, 57 bp, synthetic construct
  source 1..57: mol_type = other DNA
cctacacgacgctcttccgatctnnnnnnacatcagcccagagcagctagcatataa

SEQ ID NO: 308 - DNA, 59 bp, synthetic construct
  source 1..59: mol_type = other DNA
cctacacgacgctcttccgatctnnnnnnacatcaggagcagacaccaatgtgtagtat

SEQ ID NO: 309 - DNA, 59 bp, synthetic construct
  source 1..59: mol_type = other DNA
cctacacgacgctcttccgatctnnnnnnacatcagtggcccagtggtagaacatatac

SEQ ID NO: 310 - DNA, 58 bp, synthetic construct
  source 1..58: mol_type = other DNA
cctacacgacgctcttccgatctnnnnnnacatcagggtcgaacactatctgcaatct

SEQ ID NO: 311 - DNA, 57 bp, synthetic construct
  source 1..57: mol_type = other DNA
cctacacgacgctcttccgatctnnnnnnacatcagctggtctgcctttgttctttc

SEQ ID NO: 312 - DNA, 58 bp, synthetic construct
  source 1..58: mol_type = other DNA
cctacacgacgctcttccgatctnnnnnnacatcagatgctggcagtcttccctatac

SEQ ID NO: 313 - DNA, 58 bp, synthetic construct
  source 1..58: mol_type = other DNA
cctacacgacgctcttccgatctnnnnnnacatcagggactggacacgaaatctcata

SEQ ID NO: 314 - DNA, 60 bp, synthetic construct
  source 1..60: mol_type = other DNA
cctacacgacgctcttccgatctnnnnnnacatcacaatctgagtgaatcccagctagag

SEQ ID NO: 315 - DNA, 58 bp, synthetic construct
  source 1..58: mol_type = other DNA
cctacacgacgctcttccgatctnnnnnnacatcaacgaagagggtgtgatgtgtatg

SEQ ID NO: 316 - DNA, 57 bp, synthetic construct
  source 1..57: mol_type = other DNA
cctacacgacgctcttccgatctnnnnnnacatcatgaaggaggaagctgacctaga

SEQ ID NO: 317 - DNA, 59 bp, synthetic construct
  source 1..59: mol_type = other DNA
cctacacgacgctcttccgatctnnnnnnacatcaggaaggaaggaaggaaggaagaaa

SEQ ID NO: 318 - DNA, 57 bp, synthetic construct
  source 1..57: mol_type = other DNA
cctacacgacgctcttccgatctnnnnnnacatcacgtcctcattgcctacctcatt

SEQ ID NO: 319 - DNA, 61 bp, synthetic construct
  source 1..61: mol_type = other DNA
cctacacgacgctcttccgatctnnnnnnacatcacactgtagaaacagagacaggagaag

SEQ ID NO: 320 - DNA, 58 bp, synthetic construct
  source 1..58: mol_type = other DNA
cctacacgacgctcttccgatctnnnnnnacatcaagaggcccaagtctgtgtttatt

SEQ ID NO: 321 - DNA, 59 bp, synthetic construct
  source 1..59: mol_type = other DNA
cctacacgacgctcttccgatctnnnnnnacatcaggatccttgaagaccaccacatag

SEQ ID NO: 322 - DNA, 57 bp, synthetic construct
  source 1..57: mol_type = other DNA
cctacacgacgctcttccgatctnnnnnnacatcacctgcaagtctctcccaattct

SEQ ID NO: 323 - DNA, 59 bp, synthetic construct
  source 1..59: mol_type = other DNA
cctacacgacgctcttccgatctnnnnnnacatcatatcttgaacgagcacaccttctg

SEQ ID NO: 324 - DNA, 58 bp, synthetic construct
  source 1..58: mol_type = other DNA
cctacacgacgctcttccgatctnnnnnnacatcaaagtcactgtctcacaccagttc

SEQ ID NO: 325 - DNA, 58 bp, synthetic construct
  source 1..58: mol_type = other DNA
cctacacgacgctcttccgatctnnnnnnacatcacggactcgtccaacgactataaa

SEQ ID NO: 326 - DNA, 61 bp, synthetic construct
  source 1..61: mol_type = other DNA
cctacacgacgctcttccgatctnnnnnnacatcaccaccctagaccactattcacttatc

SEQ ID NO: 327 - DNA, 57 bp, synthetic construct
  source 1..57: mol_type = other DNA
cctacacgacgctcttccgatctnnnnnnacatcaccttgcctgtgtagctgatagt

SEQ ID NO: 328 - DNA, 57 bp, synthetic construct
  source 1..57: mol_type = other DNA
cctacacgacgctcttccgatctnnnnnnacatcagagagtgctgcctggattactt

SEQ ID NO: 329 - DNA, 59 bp, synthetic construct
  source 1..59: mol_type = other DNA
cctacacgacgctcttccgatctnnnnnnacatcagggaatagctcacagcagtcatta

SEQ ID NO: 330 - DNA, 57 bp, synthetic construct
  source 1..57: mol_type = other DNA
cctacacgacgctcttccgatctnnnnnnacatcagaaagcaatggacggcatcatc

SEQ ID NO: 331 - DNA, 58 bp, synthetic construct
  source 1..58: mol_type = other DNA
cctacacgacgctcttccgatctnnnnnnacatcaggttctgtccctagctggttaag

SEQ ID NO: 332 - DNA, 59 bp, synthetic construct
  source 1..59: mol_type = other DNA
cctacacgacgctcttccgatctnnnnnnacatcacagaaggatgtggaagagtgagtg

SEQ ID NO: 333 - DNA, 57 bp, synthetic construct
  source 1..57: mol_type = other DNA
cctacacgacgctcttccgatctnnnnnnacatcaggtgcctggtctgatgatgtat

SEQ ID NO: 334 - DNA, 58 bp, synthetic construct
  source 1..58: mol_type = other DNA
cctacacgacgctcttccgatctnnnnnnacatcactcactccctgctgtcactttag

SEQ ID NO: 335 - DNA, 59 bp, synthetic construct
  source 1..59: mol_type = other DNA
cctacacgacgctcttccgatctnnnnnnacatcaggactccttcatgttctccatacc

SEQ ID NO: 336 - DNA, 57 bp, synthetic construct
  source 1..57: mol_type = other DNA
cctacacgacgctcttccgatctnnnnnnacatcacttgagcctggagttccgttat

SEQ ID NO: 337 - DNA, 59 bp, synthetic construct
  source 1..59: mol_type = other DNA
cctacacgacgctcttccgatctnnnnnnacatcatggtcttccatctgctccttaaat

SEQ ID NO: 338 - DNA, 59 bp, synthetic construct
  source 1..59: mol_type = other DNA
cctacacgacgctcttccgatctnnnnnnacatcacaagaaccgtgccatagtctcata

SEQ ID NO: 339 - DNA, 60 bp, synthetic construct
  source 1..60: mol_type = other DNA
cctacacgacgctcttccgatctnnnnnnacatcactgtctctgtgtctctgtctctttg

SEQ ID NO: 340 - DNA, 59 bp, synthetic construct
  source 1..59: mol_type = other DNA
cctacacgacgctcttccgatctnnnnnnacatcagtggttatggagaaggtggagatg

SEQ ID NO: 341 - DNA, 58 bp, synthetic construct
  source 1..58: mol_type = other DNA
cctacacgacgctcttccgatctnnnnnnacatcacagactgacctatgcaacgagag

SEQ ID NO: 342 - DNA, 59 bp, synthetic construct
  source 1..59: mol_type = other DNA
cctacacgacgctcttccgatctnnnnnnacatcaccagtggatggctagtcctaattg

SEQ ID NO: 343 - DNA, 58 bp, synthetic construct
  source 1..58: mol_type = other DNA
cctacacgacgctcttccgatctnnnnnnacatcacagccaacagcaagaaagagatg

SEQ ID NO: 344 - DNA, 57 bp, synthetic construct
  source 1..57: mol_type = other DNA
cctacacgacgctcttccgatctnnnnnnacatcaagaggactctgagacagcacat

SEQ ID NO: 345 - DNA, 58 bp, synthetic construct
  source 1..58: mol_type = other DNA
cctacacgacgctcttccgatctnnnnnnacatcatgtgacctctgtgatccctaaga

SEQ ID NO: 346 - DNA, 59 bp, synthetic construct
  source 1..59: mol_type = other DNA
cctacacgacgctcttccgatctnnnnnnacatcagaacagcagttgctagtcctacat

SEQ ID NO: 347 - DNA, 60 bp, synthetic construct
  source 1..60: mol_type = other DNA
cctacacgacgctcttccgatctnnnnnnacatcatcctgactcctctagctttcatttc

SEQ ID NO: 348 - DNA, 57 bp, synthetic construct
  source 1..57: mol_type = other DNA
cctacacgacgctcttccgatctnnnnnnacatcagtccctgggaagctgttatctt

SEQ ID NO: 349 - DNA, 57 bp, synthetic construct
  source 1..57: mol_type = other DNA
cctacacgacgctcttccgatctnnnnnnacatcacactcacctgctgctactcatt

SEQ ID NO: 350 - DNA, 57 bp, synthetic construct
  source 1..57: mol_type = other DNA
cctacacgacgctcttccgatctnnnnnnacatcagctttgagaccacaccctatga

SEQ ID NO: 351 - DNA, 59 bp, synthetic construct
  source 1..59: mol_type = other DNA
cctacacgacgctcttccgatctnnnnnnacatcatctcaaggtctgaggtacgaagaa

SEQ ID NO: 352 - DNA, 58 bp, synthetic construct
  source 1..58: mol_type = other DNA
cctacacgacgctcttccgatctnnnnnnacatcacagccagaagcagactccttaat

SEQ ID NO: 353 - DNA, 59 bp, synthetic construct
  source 1..59: mol_type = other DNA
cctacacgacgctcttccgatctnnnnnnacatcaggcttcctgctcctatctaacttc

SEQ ID NO: 354 - DNA, 59 bp, synthetic construct
  source 1..59: mol_type = other DNA
cctacacgacgctcttccgatctnnnnnnacatcaggctttcagactccaacatcattc

SEQ ID NO: 355 - DNA, 59 bp, synthetic construct
  source 1..59: mol_type = other DNA
cctacacgacgctcttccgatctnnnnnnacatcacctgtttgaagccacagaaagaag

SEQ ID NO: 356 - DNA, 57 bp, synthetic construct
  source 1..57: mol_type = other DNA
cctacacgacgctcttccgatctnnnnnnacatcaggtggaatgtggtggagaagaa

SEQ ID NO: 357 - DNA, 56 bp, synthetic construct
  source 1..56: mol_type = other DNA
cctacacgacgctcttccgatctnnnnnnacatcagtcgccaaccgaaacaagatg

SEQ ID NO: 358 - DNA, 58 bp, synthetic construct
  source 1..58: mol_type = other DNA
cctacacgacgctcttccgatctnnnnnnacatcagctgcttcagccaaatacagaaa

SEQ ID NO: 359 - DNA, 59 bp, synthetic construct
  source 1..59: mol_type = other DNA
cctacacgacgctcttccgatctnnnnnnacatcacatgacctgttctaccgcttagag

SEQ ID NO: 360 - DNA, 60 bp, synthetic construct
  source 1..60: mol_type = other DNA
cctacacgacgctcttccgatctnnnnnnacatcatgaagtctgtcaaacaggagatgaa

SEQ ID NO: 361 - DNA, 59 bp, synthetic construct
  source 1..59: mol_type = other DNA
cctacacgacgctcttccgatctnnnnnnacatcaagagagatttgagagagggcaaag

SEQ ID NO: 362 - DNA, 59 bp, synthetic construct
  source 1..59: mol_type = other DNA
cctacacgacgctcttccgatctnnnnnnacatcagatgactacatcggcgagaatacc

SEQ ID NO: 363 - DNA, 60 bp, synthetic construct
  source 1..60: mol_type = other DNA
cctacacgacgctcttccgatctnnnnnnacatcagatcattctctccacttccgagttt

SEQ ID NO: 364 - DNA, 59 bp, synthetic construct
  source 1..59: mol_type = other DNA
cctacacgacgctcttccgatctnnnnnnacatcagctcggaagacagcctcttattac

SEQ ID NO: 365 - DNA, 57 bp, synthetic construct
  source 1..57: mol_type = other DNA
cctacacgacgctcttccgatctnnnnnnacatcacacaaaccacgcagtcattcag

SEQ ID NO: 366 - DNA, 58 bp, synthetic construct
  source 1..58: mol_type = other DNA
cctacacgacgctcttccgatctnnnnnnacatcagactggacctcacctgtactttg

SEQ ID NO: 367 - DNA, 57 bp, synthetic construct
  source 1..57: mol_type = other DNA
cctacacgacgctcttccgatctnnnnnnacatcaactcagacggaatgttcaccag

SEQ ID NO: 368 - DNA, 59 bp, synthetic construct
  source 1..59: mol_type = other DNA
cctacacgacgctcttccgatctnnnnnnacatcattattcagagccgttggtgtatct

SEQ ID NO: 369 - DNA, 57 bp, synthetic construct
  source 1..57: mol_type = other DNA
cctacacgacgctcttccgatctnnnnnnacatcacgcctcaaaccttccaaatcac

SEQ ID NO: 370 - DNA, 57 bp, synthetic construct
  source 1..57: mol_type = other DNA
cctacacgacgctcttccgatctnnnnnnacatcaagtcttagtgactgggctagga

SEQ ID NO: 371 - DNA, 59 bp, synthetic construct
  source 1..59: mol_type = other DNA
cctacacgacgctcttccgatctnnnnnnacatcacacaagagagacaggaccaagaag

SEQ ID NO: 372 - DNA, 58 bp, synthetic construct
  source 1..58: mol_type = other DNA
cctacacgacgctcttccgatctnnnnnnacatcagaccataggcaactggagctaaa

SEQ ID NO: 373 - DNA, 60 bp, synthetic construct
  source 1..60: mol_type = other DNA
cctacacgacgctcttccgatctnnnnnnacatcactagatcctccggtcgtgactataa

SEQ ID NO: 374 - DNA, 59 bp, synthetic construct
  source 1..59: mol_type = other DNA
cctacacgacgctcttccgatctnnnnnnacatcagctacccacaagggaagtgtatag

SEQ ID NO: 375 - DNA, 59 bp, synthetic construct
  source 1..59: mol_type = other DNA
cctacacgacgctcttccgatctnnnnnnacatcacgagcctactctgacatgaagaaa

SEQ ID NO: 376 - DNA, 56 bp, synthetic construct
  source 1..56: mol_type = other DNA
cctacacgacgctcttccgatctnnnnnnacatcaaactggcaaggaggacagaag

SEQ ID NO: 377 - DNA, 59 bp, synthetic construct
  source 1..59: mol_type = other DNA
cctacacgacgctcttccgatctnnnnnnacatcacaacaccagagtaggagacaaagg

SEQ ID NO: 378 - DNA, 59 bp, synthetic construct
  source 1..59: mol_type = other DNA
cctacacgacgctcttccgatctnnnnnnacatcagacttcctccagaagatggatgac

SEQ ID NO: 379 - DNA, 57 bp, synthetic construct
  source 1..57: mol_type = other DNA
cctacacgacgctcttccgatctnnnnnnacatcagctatgagttggacagggactt

SEQ ID NO: 380 - DNA, 60 bp, synthetic construct
  source 1..60: mol_type = other DNA
cctacacgacgctcttccgatctnnnnnnacatcagttctggtgaaggaaatgcgtaaag

SEQ ID NO: 381 - DNA, 57 bp, synthetic construct
  source 1..57: mol_type = other DNA
cctacacgacgctcttccgatctnnnnnnacatcaggacttggttcgccactctaat

SEQ ID NO: 382 - DNA, 59 bp, synthetic construct
  source 1..59: mol_type = other DNA
cctacacgacgctcttccgatctnnnnnnacatcatggatggagatgggaagaagaaag

SEQ ID NO: 383 - DNA, 57 bp, synthetic construct
  source 1..57: mol_type = other DNA
cctacacgacgctcttccgatctnnnnnnacatcaattggctgccatcctctacttc

SEQ ID NO: 384 - DNA, 59 bp, synthetic construct
  source 1..59: mol_type = other DNA
cctacacgacgctcttccgatctnnnnnnacatcaggttacctgacaactccctacttc

SEQ ID NO: 385 - DNA, 59 bp, synthetic construct
  source 1..59: mol_type = other DNA
cctacacgacgctcttccgatctnnnnnnacatcagaagcccgatctccaagtctttat

SEQ ID NO: 386 - DNA, 60 bp, synthetic construct
  source 1..60: mol_type = other DNA
cctacacgacgctcttccgatctnnnnnnacatcacagaagactcaggagaagcactatg

SEQ ID NO: 387 - DNA, 59 bp, synthetic construct
  source 1..59: mol_type = other DNA
cctacacgacgctcttccgatctnnnnnnacatcagtaaggtggtctctggcctttatt

SEQ ID NO: 388 - DNA, 58 bp, synthetic construct
  source 1..58: mol_type = other DNA
cctacacgacgctcttccgatctnnnnnnacatcagacatataccgcccatgcaaatg

SEQ ID NO: 389 - DNA, 59 bp, synthetic construct
  source 1..59: mol_type = other DNA
cctacacgacgctcttccgatctnnnnnnacatcagcatttgtgtggtctctctcttct

SEQ ID NO: 390 - DNA, 59 bp, synthetic construct
  source 1..59: mol_type = other DNA
cctacacgacgctcttccgatctnnnnnnacatcaccagctccaactactaccaagaac

SEQ ID NO: 391 - DNA, 59 bp, synthetic construct
  source 1..59: mol_type = other DNA
cctacacgacgctcttccgatctnnnnnnacatcagtggatcttctctcaagcctcatt

SEQ ID NO: 392 - DNA, 58 bp, synthetic construct
  source 1..58: mol_type = other DNA
cctacacgacgctcttccgatctnnnnnnacatcaggtcctcatgacgctccttattt

SEQ ID NO: 393 - DNA, 59 bp, synthetic construct
  source 1..59: mol_type = other DNA
cctacacgacgctcttccgatctnnnnnnacatcactatacattccgcccatccaatct

SEQ ID NO: 394 - DNA, 59 bp, synthetic construct
  source 1..59: mol_type = other DNA
cctacacgacgctcttccgatctnnnnnnacatcagaggaaatcccacatcacctacag

SEQ ID NO: 395 - DNA, 57 bp, synthetic construct
  source 1..57: mol_type = other DNA
cctacacgacgctcttccgatctnnnnnnacatcaagagattgcctctgcgcttaat

SEQ ID NO: 396 - DNA, 59 bp, synthetic construct
  source 1..59: mol_type = other DNA
cctacacgacgctcttccgatctnnnnnnacatcacagtcaaccaacatgaagcatctc

SEQ ID NO: 397 - DNA, 59 bp, synthetic construct
  source 1..59: mol_type = other DNA
cctacacgacgctcttccgatctnnnnnnacatcaagaggaagaggaggaagaagaaga

SEQ ID NO: 398 - DNA, 57 bp, synthetic construct
  source 1..57: mol_type = other DNA
cctacacgacgctcttccgatctnnnnnnacatcaaggacgagcgatggattgtaaa

SEQ ID NO: 399 - DNA, 59 bp, synthetic construct
  source 1..59: mol_type = other DNA
cctacacgacgctcttccgatctnnnnnnacatcaggagtacctcctggtgtcctataa

SEQ ID NO: 400 - DNA, 60 bp, synthetic construct
  source 1..60: mol_type = other DNA
cctacacgacgctcttccgatctnnnnnnacatcactgctcttggtttcttccactatct

SEQ ID NO: 401 - DNA, 60 bp, synthetic construct
  source 1..60: mol_type = other DNA
cctacacgacgctcttccgatctnnnnnnacatcagaagaagtgggttctggagactatg

SEQ ID NO: 402 - DNA, 57 bp, synthetic construct
  source 1..57: mol_type = other DNA
cctacacgacgctcttccgatctnnnnnnacatcacgagggctctttctaccaatgt

SEQ ID NO: 403 - DNA, 58 bp, synthetic construct
  source 1..58: mol_type = other DNA
cctacacgacgctcttccgatctnnnnnnacatcacatgaaggacctctagctggaac

SEQ ID NO: 404 - DNA, 58 bp, synthetic construct
  source 1..58: mol_type = other DNA
cctacacgacgctcttccgatctnnnnnnacatcaggcgccctctttctatcactatc

SEQ ID NO: 405 - DNA, 59 bp, synthetic construct
  source 1..59: mol_type = other DNA
cctacacgacgctcttccgatctnnnnnnacatcatggctctctctctctctcttctac

SEQ ID NO: 406 - DNA, 60 bp, synthetic construct
  source 1..60: mol_type = other DNA
cctacacgacgctcttccgatctnnnnnnacatcagttcctcacttccaaagacctagag

SEQ ID NO: 407 - DNA, 57 bp, synthetic construct
  source 1..57: mol_type = other DNA
cctacacgacgctcttccgatctnnnnnnacatcagcagcacttgagtggctatttc

SEQ ID NO: 408 - DNA, 59 bp, synthetic construct
  source 1..59: mol_type = other DNA
cctacacgacgctcttccgatctnnnnnnacatcacggatccatactgacacccaataa

SEQ ID NO: 409 - DNA, 57 bp, synthetic construct
  source 1..57: mol_type = other DNA
cctacacgacgctcttccgatctnnnnnnacatcacccagctaacttccacctttct

SEQ ID NO: 410 - DNA, 60 bp, synthetic construct
  source 1..60: mol_type = other DNA
cctacacgacgctcttccgatctnnnnnnacatcagagaatcctggaagagtgctgatag

SEQ ID NO: 411 - DNA, 59 bp, synthetic construct
  source 1..59: mol_type = other DNA
cctacacgacgctcttccgatctnnnnnnacatcagccgaccttctcttagtcttcatc

SEQ ID NO: 412 - DNA, 58 bp, synthetic construct
  source 1..58: mol_type = other DNA
cctacacgacgctcttccgatctnnnnnnacatcagtgcagtttggctttctggtatg

SEQ ID NO: 413 - DNA, 59 bp, synthetic construct
  source 1..59: mol_type = other DNA
cctacacgacgctcttccgatctnnnnnnacatcaggagtcaggtctacatcggaaatg

SEQ ID NO: 414 - DNA, 59 bp, synthetic construct
  source 1..59: mol_type = other DNA
cctacacgacgctcttccgatctnnnnnnacatcaaaggcaacagagaagccaatacta

SEQ ID NO: 415 - DNA, 59 bp, synthetic construct
  source 1..59: mol_type = other DNA
cctacacgacgctcttccgatctnnnnnnacatcatgtcagtaccacagtgaggagata

SEQ ID NO: 416 - DNA, 59 bp, synthetic construct
  source 1..59: mol_type = other DNA
cctacacgacgctcttccgatctnnnnnnacatcacacagccctctccatcaactataa

SEQ ID NO: 417 - DNA, 59 bp, synthetic construct
  source 1..59: mol_type = other DNA
cctacacgacgctcttccgatctnnnnnnacatcacagggctgagactacaaacgatac

SEQ ID NO: 418 - DNA, 59 bp, synthetic construct
  source 1..59: mol_type = other DNA
cctacacgacgctcttccgatctnnnnnnacatcacgctgtaggaatgagaagaagagg

SEQ ID NO: 419 - DNA, 59 bp, synthetic construct
  source 1..59: mol_type = other DNA
cctacacgacgctcttccgatctnnnnnnacatcacgtatccgggtcaacagatactac

SEQ ID NO: 420 - DNA, 59 bp, synthetic construct
  source 1..59: mol_type = other DNA
cctacacgacgctcttccgatctnnnnnnacatcatcctaacaagtctggaaagcatca

SEQ ID NO: 421 - DNA, 58 bp, synthetic construct
  source 1..58: mol_type = other DNA
cctacacgacgctcttccgatctnnnnnnacatcacctcctacctgggcttgtaattc

SEQ ID NO: 422 - DNA, 60 bp, synthetic construct
  source 1..60: mol_type = other DNA
cctacacgacgctcttccgatctnnnnnnacatcacccagtacagctcatgtttgataga

SEQ ID NO: 423 - DNA, 59 bp, synthetic construct
  source 1..59: mol_type = other DNA
cctacacgacgctcttccgatctnnnnnnacatcatctacccatttgatggaccttctg

SEQ ID NO: 424 - DNA, 58 bp, synthetic construct
  source 1..58: mol_type = other DNA
cctacacgacgctcttccgatctnnnnnnacatcagtcactacccaaccttgctaaga

SEQ ID NO: 425 - DNA, 59 bp, synthetic construct
  source 1..59: mol_type = other DNA
cctacacgacgctcttccgatctnnnnnnacatcacagcaagagatcccatacgaagag

SEQ ID NO: 426 - DNA, 57 bp, synthetic construct
  source 1..57: mol_type = other DNA
cctacacgacgctcttccgatctnnnnnnacatcagatgtggacctgtggctaatca

SEQ ID NO: 427 - DNA, 59 bp, synthetic construct; identical to SEQ ID NO: 317
  source 1..59: mol_type = other DNA

SEQ ID NO: 428 - DNA, 58 bp, synthetic construct
  source 1..58: mol_type = other DNA
cctacacgacgctcttccgatctnnnnnnacatcagaggattctgggttgctcttctt

SEQ ID NO: 429 - DNA, 58 bp, synthetic construct
  source 1..58: mol_type = other DNA
cctacacgacgctcttccgatctnnnnnnacatcactgagcaagtgtgagggtcaata

SEQ ID NO: 430 - DNA, 60 bp, synthetic construct
  source 1..60: mol_type = other DNA
cctacacgacgctcttccgatctnnnnnnacatcaggctctaaagacgactccttgtatc

SEQ ID NO: 431 - DNA, 57 bp, synthetic construct
  source 1..57: mol_type = other DNA
cctacacgacgctcttccgatctnnnnnnacatcacctggtgggacaatacctttga

SEQ ID NO: 432 - DNA, 58 bp, synthetic construct
  source 1..58: mol_type = other DNA
cctacacgacgctcttccgatctnnnnnnacatcaccaccaatcttcctgctctctaa

SEQ ID NO: 433 - DNA, 59 bp, synthetic construct
  source 1..59: mol_type = other DNA
cctacacgacgctcttccgatctnnnnnnacatcaccacctgggagattaaggttctac

SEQ ID NO: 434 - DNA, 57 bp, synthetic construct
  source 1..57: mol_type = other DNA
cctacacgacgctcttccgatctnnnnnnacatcaccaggagaactttgagccattc

SEQ ID NO: 435 - DNA, 60 bp, synthetic construct
  source 1..60: mol_type = other DNA
cctacacgacgctcttccgatctnnnnnnacatcagaagttcttggcatcactgtctttc

SEQ ID NO: 436 - DNA, 58 bp, synthetic construct
  source 1..58: mol_type = other DNA
cctacacgacgctcttccgatctnnnnnnacatcagatcctttggaccctctgacttg

SEQ ID NO: 437 - DNA, 59 bp, synthetic construct
  source 1..59: mol_type = other DNA
cctacacgacgctcttccgatctnnnnnnacatcaaccctactgcatcaagctaactac

SEQ ID NO: 438 - DNA, 58 bp, synthetic construct
  source 1..58: mol_type = other DNA
cctacacgacgctcttccgatctnnnnnnacatcaagaggatcaccgtgcagaattag

SEQ ID NO: 439 - DNA, 58 bp, synthetic construct
  source 1..58: mol_type = other DNA
cctacacgacgctcttccgatctnnnnnnacatcaggagatcacagcccagtcaatta

SEQ ID NO: 440 - DNA, 59 bp, synthetic construct
  source 1..59: mol_type = other DNA
cctacacgacgctcttccgatctnnnnnnacatcagctgacacttagcctcacatatcc

SEQ ID NO: 441 - DNA, 59 bp, synthetic construct
  source 1..59: mol_type = other DNA
cctacacgacgctcttccgatctnnnnnnacatcaataaccaccatcatcgacaccttc

SEQ ID NO: 442 - DNA, 59 bp, synthetic construct
  source 1..59: mol_type = other DNA
cctacacgacgctcttccgatctnnnnnnacatcagggaagctctttctccacttactc

SEQ ID NO: 443 - DNA, 58 bp, synthetic construct
  source 1..58: mol_type = other DNA
cctacacgacgctcttccgatctnnnnnnacatcactggagaaacctgccaagtatga

SEQ ID NO: 444 - DNA, 58 bp, synthetic construct
  source 1..58: mol_type = other DNA
cctacacgacgctcttccgatctnnnnnnacatcaaattggagcagtccagcctatac

SEQ ID NO: 445 - DNA, 60 bp, synthetic construct
  source 1..60: mol_type = other DNA
cctacacgacgctcttccgatctnnnnnnacatcactcgctgtctgagagttcacttatt

SEQ ID NO: 446 - DNA, 58 bp, synthetic construct
  source 1..58: mol_type = other DNA
cctacacgacgctcttccgatctnnnnnnacatcagactcaagatccaggtccgaaag

SEQ ID NO: 447 - DNA, 59 bp, synthetic construct
  source 1..59: mol_type = other DNA
cctacacgacgctcttccgatctnnnnnnacatcagtttcctccagacttcctcctttc

SEQ ID NO: 448 - DNA, 57 bp, synthetic construct
  source 1..57: mol_type = other DNA
cctacacgacgctcttccgatctnnnnnnacatcaaaaggctgtggtgaacctagac

SEQ ID NO: 449 - DNA, 60 bp, synthetic construct
  source 1..60: mol_type = other DNA
cctacacgacgctcttccgatctnnnnnnacatcatctggtcatctccctcatcttctac

SEQ ID NO: 450 - DNA, 59 bp, synthetic construct
  source 1..59: mol_type = other DNA
cctacacgacgctcttccgatctnnnnnnacatcatctaatctcactctgtccctctgt

SEQ ID NO: 451 - DNA, 59 bp, synthetic construct
  source 1..59: mol_type = other DNA
cctacacgacgctcttccgatctnnnnnnacatcagctaagagaggagttggaggtaga

SEQ ID NO: 452 - DNA, 57 bp, synthetic construct
  source 1..57: mol_type = other DNA
cctacacgacgctcttccgatctnnnnnnacatcacatctcaccaggcttcagtcat

SEQ ID NO: 453 - DNA, 59 bp, synthetic construct
  source 1..59: mol_type = other DNA
cctacacgacgctcttccgatctnnnnnnacatcagtgtccagtctcatcctgtcaatc

SEQ ID NO: 454 - DNA, 59 bp, synthetic construct
  source 1..59: mol_type = other DNA
cctacacgacgctcttccgatctnnnnnnacatcagcttctcactaccctgtcttcatc

SEQ ID NO: 455 - DNA, 58 bp, synthetic construct
  source 1..58: mol_type = other DNA
cctacacgacgctcttccgatctnnnnnnacatcatccaatgcctacagctcctattg

SEQ ID NO: 456 - DNA, 57 bp, synthetic construct
  source 1..57: mol_type = other DNA
cctacacgacgctcttccgatctnnnnnnacatcatgactgtgagccctccaataag

SEQ ID NO: 457 - DNA, 57 bp, synthetic construct
  source 1..57: mol_type = other DNA
cctacacgacgctcttccgatctnnnnnnacatcattctagcctctcccttccttct

SEQ ID NO: 458 - DNA, 59 bp, synthetic construct
  source 1..59: mol_type = other DNA
cctacacgacgctcttccgatctnnnnnnacatcactctagcactggaggagatcaaag

SEQ ID NO: 459 - DNA, 59 bp, synthetic construct
  source 1..59: mol_type = other DNA
cctacacgacgctcttccgatctnnnnnnacatcaggttgacccagtttgggagaatag

SEQ ID NO: 460 - DNA, 57 bp, synthetic construct
  source 1..57: mol_type = other DNA
cctacacgacgctcttccgatctnnnnnnacatcagagaaggacatgaggtgcagtt

SEQ ID NO: 461 - DNA, 58 bp, synthetic construct
  source 1..58: mol_type = other DNA
cctacacgacgctcttccgatctnnnnnnacatcattagggagccggatttgtgtatc

SEQ ID NO: 462 - DNA, 57 bp, synthetic construct
  source 1..57: mol_type = other DNA
cctacacgacgctcttccgatctnnnnnnacatcacatgaacgactttgtggctgtg

SEQ ID NO: 463 - DNA, 59 bp, synthetic construct
  source 1..59: mol_type = other DNA
cctacacgacgctcttccgatctnnnnnnacatcatgtcgttgggattgagttgtaaga

SEQ ID NO: 464 - DNA, 59 bp, synthetic construct
  source 1..59: mol_type = other DNA
cctacacgacgctcttccgatctnnnnnnacatcagtccctctggaaaccaggaataag

SEQ ID NO: 465 - DNA, 57 bp, synthetic construct
  source 1..57: mol_type = other DNA
cctacacgacgctcttccgatctnnnnnnacatcaggtttctgcctgtgtgcttatg

SEQ ID NO: 466 - DNA, 59 bp, synthetic construct
  source 1..59: mol_type = other DNA
cctacacgacgctcttccgatctnnnnnnacatcactctcctggaacaaatgaggagac

SEQ ID NO: 467 - DNA, 59 bp, synthetic construct
  source 1..59: mol_type = other DNA
cctacacgacgctcttccgatctnnnnnnacatcacaaagacgcttgacagatggaaac

SEQ ID NO: 468 - DNA, 59 bp, synthetic construct
  source 1..59: mol_type = other DNA
cctacacgacgctcttccgatctnnnnnnacatcagctgagtgagaacagagggtattt

SEQ ID NO: 469 - DNA, 59 bp, synthetic construct
  source 1..59: mol_type = other DNA
cctacacgacgctcttccgatctnnnnnnacatcactcccagccatgaagacactaatc

SEQ ID NO: 470 - DNA, 59 bp, synthetic construct
  source 1..59: mol_type = other DNA
cctacacgacgctcttccgatctnnnnnnacatcatcatgcagagaaacaagcctatga

SEQ ID NO: 471 - DNA, 57 bp, synthetic construct
  source 1..57: mol_type = other DNA
cctacacgacgctcttccgatctnnnnnnacatcagcaaatgggccaatccctaatg

SEQ ID NO: 472 - DNA, 59 bp, synthetic construct
  source 1..59: mol_type = other DNA
cctacacgacgctcttccgatctnnnnnnacatcagtacccgagttacctctaggatca

SEQ ID NO: 473 - DNA, 59 bp, synthetic construct
  source 1..59: mol_type = other DNA
cctacacgacgctcttccgatctnnnnnnacatcaccctaagcaacagaaccttcctaa

SEQ ID NO: 474 - DNA, 59 bp, synthetic construct
  source 1..59: mol_type = other DNA
cctacacgacgctcttccgatctnnnnnnacatcaggactgaaggcaatgaaggaaatg

SEQ ID NO: 475 - DNA, 59 bp, synthetic construct
  source 1..59: mol_type = other DNA
cctacacgacgctcttccgatctnnnnnnacatcatgtctttgtaccctcctcagaaac

SEQ ID NO: 476 - DNA, 59 bp, synthetic construct
  source 1..59: mol_type = other DNA
cctacacgacgctcttccgatctnnnnnnacatcagcccaagattcagtccacctaata

SEQ ID NO: 477 - DNA, 59 bp, synthetic construct
  source 1..59: mol_type = other DNA
cctacacgacgctcttccgatctnnnnnnacatcaactccaggttcttcacagcttatt

SEQ ID NO: 478 - DNA, 59 bp, synthetic construct
  source 1..59: mol_type = other DNA
cctacacgacgctcttccgatctnnnnnnacatcagtcaagtcgaggtcagaggtttac

SEQ ID NO: 479 - DNA, 56 bp, synthetic construct
  source 1..56: mol_type = other DNA
cctacacgacgctcttccgatctnnnnnnacatcatggctgactgggtgtgtttag

SEQ ID NO: 480 - DNA, 58 bp, synthetic construct
  source 1..58: mol_type = other DNA
cctacacgacgctcttccgatctnnnnnnacatcattagctcagcacgagagcaatta

SEQ ID NO: 481 - DNA, 59 bp, synthetic construct
  source 1..59: mol_type = other DNA
cctacacgacgctcttccgatctnnnnnnacatcacttcctcccacacccataattcta

SEQ ID NO: 482 - DNA, 59 bp, synthetic construct
  source 1..59: mol_type = other DNA
cctacacgacgctcttccgatctnnnnnnacatcactcctgtccatccatccagtttac

SEQ ID NO: 483 - DNA, 57 bp, synthetic construct
  source 1..57: mol_type = other DNA
cctacacgacgctcttccgatctnnnnnnacatcagcctgaaggacaggaaggattt

SEQ ID NO: 484 - DNA, 58 bp, synthetic construct
  source 1..58: mol_type = other DNA
cctacacgacgctcttccgatctnnnnnnacatcagaaagccttccgctaccttctta

SEQ ID NO: 485 - DNA, 58 bp, synthetic construct
  source 1..58: mol_type = other DNA
cctacacgacgctcttccgatctnnnnnnacatcaaatataccctccgcacgcattag

SEQ ID NO: 486 - DNA, 59 bp, synthetic construct
  source 1..59: mol_type = other DNA
cctacacgacgctcttccgatctnnnnnnacatcagaccaagaacagagacagctacag

SEQ ID NO: 487 - DNA, 59 bp, synthetic construct
  source 1..59: mol_type = other DNA
cctacacgacgctcttccgatctnnnnnnacatcaggacttaccctatgagacgagaga

SEQ ID NO: 488 - DNA, 59 bp, synthetic construct
  source 1..59: mol_type = other DNA
cctacacgacgctcttccgatctnnnnnnacatcagagccatccacagagaagagttag

SEQ ID NO: 489 - DNA, 58 bp, synthetic construct
  source 1..58: mol_type = other DNA
cctacacgacgctcttccgatctnnnnnnacatcagcagccagagaactttacagaga

SEQ ID NO: 490 - DNA, 57 bp, synthetic construct
  source 1..57: mol_type = other DNA
cctacacgacgctcttccgatctnnnnnnacatcaatcccggcaatcctgttcttac

SEQ ID NO: 491 - DNA, 59 bp, synthetic construct
  source 1..59: mol_type = other DNA
cctacacgacgctcttccgatctnnnnnnacatcacagaccagagccattctcaactac

SEQ ID NO: 492 - DNA, 59 bp, synthetic construct; identical to SEQ ID NO: 477
  source 1..59: mol_type = other DNA

SEQ ID NO: 493 - DNA, 59 bp, synthetic construct
  source 1..59: mol_type = other DNA
cctacacgacgctcttccgatctnnnnnnacatcacatgaagacacttgtcctcctctc

SEQ ID NO: 494 - DNA, 59 bp, synthetic construct; identical to SEQ ID NO: 469
  source 1..59: mol_type = other DNA

SEQ ID NO: 495 - DNA, 59 bp, synthetic construct; identical to SEQ ID NO: 493
  source 1..59: mol_type = other DNA

SEQ ID NO: 496 - DNA, 56 bp, synthetic construct
  source 1..56: mol_type = other DNA
cctacacgacgctcttccgatctnnnnnnacatcatcagcagacagtggcctttac

SEQ ID NO: 497 - DNA, 57 bp, synthetic construct
  source 1..57: mol_type = other DNA
cctacacgacgctcttccgatctnnnnnnacatcacatcgtcaaccgcacctttatg

SEQ ID NO: 498 - DNA, 61 bp, synthetic construct
  source 1..61: mol_type = other DNA
cctacacgacgctcttccgatctnnnnnnacatcagagagagagagagagagagagagaga

SEQ ID NO: 499 - DNA, 59 bp, synthetic construct
  source 1..59: mol_type = other DNA
cctacacgacgctcttccgatctnnnnnnacatcaccagcttctgtgacctactgatac

SEQ ID NO: 500 - DNA, 59 bp, synthetic construct
  source 1..59: mol_type = other DNA
cctacacgacgctcttccgatctnnnnnnacatcacacacacacactctctctcgatac

SEQ ID NO: 501 - DNA, 59 bp, synthetic construct
  source 1..59: mol_type = other DNA
cctacacgacgctcttccgatctnnnnnnacatcactgggtactaaggtcaacgtgaag

SEQ ID NO: 502 - DNA, 58 bp, synthetic construct
  source 1..58: mol_type = other DNA
cctacacgacgctcttccgatctnnnnnnacatcacaggcctacaaggagagcaatta

SEQ ID NO: 503 - DNA, 58 bp, synthetic construct
  source 1..58: mol_type = other DNA
cctacacgacgctcttccgatctnnnnnnacatcactgtatccatcttcccaccatcc

SEQ ID NO: 504 - DNA, 57 bp, synthetic construct
  source 1..57: mol_type = other DNA
cctacacgacgctcttccgatctnnnnnnacatcactcagcagaccttgaacctctt

SEQ ID NO: 505 - DNA, 57 bp, synthetic construct
  source 1..57: mol_type = other DNA
cctacacgacgctcttccgatctnnnnnnacatcaaaagccatccctgtcctaagtg

SEQ ID NO: 506 - DNA, 58 bp, synthetic construct
  source 1..58: mol_type = other DNA
cctacacgacgctcttccgatctnnnnnnacatcacagaaccctgctcatgactctac

SEQ ID NO: 507 - DNA, 60 bp, synthetic construct
  source 1..60: mol_type = other DNA
cctacacgacgctcttccgatctnnnnnnacatcagtgcgagtgtcttcagtctcatatc

SEQ ID NO: 508 - DNA, 57 bp, synthetic construct
  source 1..57: mol_type = other DNA
cctacacgacgctcttccgatctnnnnnnacatcaaatgtgagcctgtggagagatg

SEQ ID NO: 509 - DNA, 57 bp, synthetic construct; identical to SEQ ID NO: 508
  source 1..57: mol_type = other DNA

SEQ ID NO: 510 - DNA, 56 bp, synthetic construct
  source 1..56: mol_type = other DNA
cctacacgacgctcttccgatctnnnnnnacatcagtgcagttcaacaggccattc

SEQ ID NO: 511 - DNA, 59 bp, synthetic construct
  source 1..59: mol_type = other DNA
cctacacgacgctcttccgatctnnnnnnacatcaagcatttgtagcctctaccctaac

SEQ ID NO: 512 - DNA, 59 bp, synthetic construct
  source 1..59: mol_type = other DNA
cctacacgacgctcttccgatctnnnnnnacatcaactggatgttgactggcttcatag

SEQ ID NO: 513 - DNA, 59 bp, synthetic construct
  source 1..59: mol_type = other DNA
cctacacgacgctcttccgatctnnnnnnacatcagcctaccagctagaggagttaatg

SEQ ID NO: 514 - DNA, 59 bp, synthetic construct
  source 1..59: mol_type = other DNA
cctacacgacgctcttccgatctnnnnnnacatcactgccctgtccttcctagataatg

SEQ ID NO: 515 - DNA, 59 bp, synthetic construct
  source 1..59: mol_type = other DNA
cctacacgacgctcttccgatctnnnnnnacatcaactctggctcccatggtatttatg

SEQ ID NO: 516 - DNA, 60 bp, synthetic construct
  source 1..60: mol_type = other DNA
cctacacgacgctcttccgatctnnnnnnacatcactggctgagcactatcttcagtatg

SEQ ID NO: 517 - DNA, 59 bp, synthetic construct
  source 1..59: mol_type = other DNA
cctacacgacgctcttccgatctnnnnnnacatcagccgtcctaactgtagtcaaagat

SEQ ID NO: 518 - DNA, 59 bp, synthetic construct; identical to SEQ ID NO: 515
  source 1..59: mol_type = other DNA

SEQ ID NO: 519 - DNA, 58 bp, synthetic construct
  source 1..58: mol_type = other DNA
cctacacgacgctcttccgatctnnnnnnacatcaacaggctctcctctcagttatca

SEQ ID NO: 520 - DNA, 57 bp, synthetic construct
  source 1..57: mol_type = other DNA
cctacacgacgctcttccgatctnnnnnnacatcagcagatgtgttcttgccttgtg

SEQ ID NO: 521 - DNA, 59 bp, synthetic construct
  source 1..59: mol_type = other DNA
cctacacgacgctcttccgatctnnnnnnacatcaaaagggaagacataacccaactcc

SEQ ID NO: 522 - DNA, 57 bp, synthetic construct
  source 1..57: mol_type = other DNA
cctacacgacgctcttccgatctnnnnnnacatcataggctctgtgctttcctgatg

SEQ ID NO: 523 - DNA, 57 bp, synthetic construct
  source 1..57: mol_type = other DNA
cctacacgacgctcttccgatctnnnnnnacatcaagctgtgagagagctgaaagtg

SEQ ID NO: 524 - DNA, 59 bp, synthetic construct
  source 1..59: mol_type = other DNA
cctacacgacgctcttccgatctnnnnnnacatcagagagccttgacacttctggtaaa

SEQ ID NO: 525 - DNA, 59 bp, synthetic construct
  source 1..59: mol_type = other DNA
cctacacgacgctcttccgatctnnnnnnacatcacctgagccagaaggaattcaaaga

SEQ ID NO: 526 - DNA, 57 bp, synthetic construct; identical to SEQ ID NO: 522
  source 1..57: mol_type = other DNA

SEQ ID NO: 527 - DNA, 57 bp, synthetic construct
  source 1..57: mol_type = other DNA
cctacacgacgctcttccgatctnnnnnnacatcacatcccatcccaccacaactat

SEQ ID NO: 528 - DNA, 59 bp, synthetic construct
  source 1..59: mol_type = other DNA
cctacacgacgctcttccgatctnnnnnnacatcactcaggaacaagagagccttaacc

SEQ ID NO: 529 - DNA, 58 bp, synthetic construct
  source 1..58: mol_type = other DNA
cctacacgacgctcttccgatctnnnnnnacatcaaggacaggaaggactttggattc

SEQ ID NO: 530 - DNA, 58 bp, synthetic construct
  source 1..58: mol_type = other DNA
cctacacgacgctcttccgatctnnnnnnacatcagaacattaccagctccgtgtttg

SEQ ID NO: 531 - DNA, 57 bp, synthetic construct
  source 1..57: mol_type = other DNA
cctacacgacgctcttccgatctnnnnnnacatcatgtctggactgttcgggatttc

SEQ ID NO: 532 - DNA, 59 bp, synthetic construct
  source 1..59: mol_type = other DNA
cctacacgacgctcttccgatctnnnnnnacatcagctcaaccctacttgggagtattt

SEQ ID NO: 533 - DNA, 58 bp, synthetic construct
  source 1..58: mol_type = other DNA
cctacacgacgctcttccgatctnnnnnnacatcacccaagagaacagctacgaacat

SEQ ID NO: 534 - DNA, 59 bp, synthetic construct; identical to SEQ ID NO: 464
  source 1..59: mol_type = other DNA

SEQ ID NO: 535 - DNA, 60 bp, synthetic construct
  source 1..60: mol_type = other DNA
tcagacgtgtgctcttccgatctnnnnnnatagttccctgacgatccagtcatactttac

SEQ ID NO: 536 - DNA, 59 bp, synthetic construct
  source 1..59: mol_type = other DNA
tcagacgtgtgctcttccgatctnnnnnnatagttggccaggtaggaatcaaactaaga

SEQ ID NO: 537 - DNA, 58 bp, synthetic construct
  source 1..58: mol_type = other DNA
tcagacgtgtgctcttccgatctnnnnnnatagttagtccatggctctggttcattag

SEQ ID NO: 538 - DNA, 58 bp, synthetic construct
  source 1..58: mol_type = other DNA
tcagacgtgtgctcttccgatctnnnnnnatagttctcggaacaaggtgaggaagaag

SEQ ID NO: 539 - DNA, 58 bp, synthetic construct
  source 1..58: mol_type = other DNA
tcagacgtgtgctcttccgatctnnnnnnatagttcatctgagtgggtgggttcaata

SEQ ID NO: 540 - DNA, 58 bp, synthetic construct
  source 1..58: mol_type = other DNA
tcagacgtgtgctcttccgatctnnnnnnatagttgggagatggttcagtgggtaaag

SEQ ID NO: 541 - DNA, 59 bp, synthetic construct
  source 1..59: mol_type = other DNA
tcagacgtgtgctcttccgatctnnnnnnatagttcagcactcttgagccaggtattag

SEQ ID NO: 542 - DNA, 57 bp, synthetic construct
  source 1..57: mol_type = other DNA
tcagacgtgtgctcttccgatctnnnnnnatagttccaacagcacctctcccatatt

SEQ ID NO: 543 - DNA, 58 bp, synthetic construct
  source 1..58: mol_type = other DNA
tcagacgtgtgctcttccgatctnnnnnnatagttatgggaggttccaaagggaatac

SEQ ID NO: 544 - DNA, 59 bp, synthetic construct
  source 1..59: mol_type = other DNA
tcagacgtgtgctcttccgatctnnnnnnatagttgcttgttctgtctgtccctcttta

SEQ ID NO: 545 - DNA, 58 bp, synthetic construct
  source 1..58: mol_type = other DNA
tcagacgtgtgctcttccgatctnnnnnnatagttgctggtcctcttcagtggaataa

SEQ ID NO: 546 - DNA, 58 bp, synthetic construct
  source 1..58: mol_type = other DNA
tcagacgtgtgctcttccgatctnnnnnnatagttccctctgagcatcggtttattct

SEQ ID NO: 547 - DNA, 61 bp, synthetic construct
  source 1..61: mol_type = other DNA
tcagacgtgtgctcttccgatctnnnnnnatagttcaggcaaagaagagagagagagttag

SEQ ID NO: 548 - DNA, 59 bp, synthetic construct
  source 1..59: mol_type = other DNA
tcagacgtgtgctcttccgatctnnnnnnatagttatccgaacagacttccaccttaaa

SEQ ID NO: 549 - DNA, 59 bp, synthetic construct
  source 1..59: mol_type = other DNA
tcagacgtgtgctcttccgatctnnnnnnatagttagggactggaattcagcctttatc

SEQ ID NO: 550 - DNA, 59 bp, synthetic construct
  source 1..59: mol_type = other DNA
tcagacgtgtgctcttccgatctnnnnnnatagttcaccgtgtctaaggttcgctaata

SEQ ID NO: 551 - DNA, 60 bp, synthetic construct
  source 1..60: mol_type = other DNA
tcagacgtgtgctcttccgatctnnnnnnatagttcatccacccatctacacatctactc

SEQ ID NO: 552 - DNA, 59 bp, synthetic construct
  source 1..59: mol_type = other DNA
tcagacgtgtgctcttccgatctnnnnnnatagttccttcaccttgcctggagatatac

SEQ ID NO: 553 - DNA, 57 bp, synthetic construct
  source 1..57: mol_type = other DNA
tcagacgtgtgctcttccgatctnnnnnnatagttaatccagccacagtccctaatg

SEQ ID NO: 554 - DNA, 57 bp, synthetic construct
  source 1..57: mol_type = other DNA
tcagacgtgtgctcttccgatctnnnnnnatagttcaagtccttgcttctgctgttg

SEQ ID NO: 555 - DNA, 59 bp, synthetic construct
  source 1..59: mol_type = other DNA
tcagacgtgtgctcttccgatctnnnnnnatagttcccttggaaacatctgcaacatac

SEQ ID NO: 556 - DNA, 59 bp, synthetic construct
  source 1..59: mol_type = other DNA
tcagacgtgtgctcttccgatctnnnnnnatagttccggcagttaagatcacacctatc

SEQ ID NO: 557 - DNA, 59 bp, synthetic construct
  source 1..59: mol_type = other DNA
tcagacgtgtgctcttccgatctnnnnnnatagttcttccaatctactggctagcttcc

SEQ ID NO: 558 - DNA, 58 bp, synthetic construct
  source 1..58: mol_type = other DNA
tcagacgtgtgctcttccgatctnnnnnnatagttccaagggtagggaagagtgaaag

SEQ ID NO: 559 - DNA, 58 bp, synthetic construct
  source 1..58: mol_type = other DNA
tcagacgtgtgctcttccgatctnnnnnnatagttgggtccaggtgccattatcttta

SEQ ID NO: 560 - DNA, 59 bp, synthetic construct
  source 1..59: mol_type = other DNA
tcagacgtgtgctcttccgatctnnnnnnatagttgttcttaacgtctgggcaacattc

SEQ ID NO: 561 - DNA, 58 bp, synthetic construct
  source 1..58: mol_type = other DNA
tcagacgtgtgctcttccgatctnnnnnnatagttgacatctgctcctctccagaatg

SEQ ID NO: 562 - DNA, 57 bp, synthetic construct
  source 1..57: mol_type = other DNA
tcagacgtgtgctcttccgatctnnnnnnatagttggctgtcaactttagcctcctt

SEQ ID NO: 563 - DNA, 59 bp, synthetic construct
  source 1..59: mol_type = other DNA
tcagacgtgtgctcttccgatctnnnnnnatagttgtctctgggaaggcccatttatta

SEQ ID NO: 564 - DNA, 59 bp, synthetic construct
  source 1..59: mol_type = other DNA
tcagacgtgtgctcttccgatctnnnnnnatagttcagatatccagaagtgggccatta

SEQ ID NO: 565 - DNA, 58 bp, synthetic construct
  source 1..58: mol_type = other DNA
tcagacgtgtgctcttccgatctnnnnnnatagttgcatgatgctctttaggctttcc

SEQ ID NO: 566 - DNA, 58 bp, synthetic construct
  source 1..58: mol_type = other DNA
tcagacgtgtgctcttccgatctnnnnnnatagttgaggcaaagtccttgtggtagaa

SEQ ID NO: 567 - DNA, 61 bp, synthetic construct
  source 1..61: mol_type = other DNA
tcagacgtgtgctcttccgatctnnnnnnatagttctacctagaatagctgtcaccaaaca

SEQ ID NO: 568 - DNA, 59 bp, synthetic construct
  source 1..59: mol_type = other DNA
tcagacgtgtgctcttccgatctnnnnnnatagttctctccagtttgcaagggatagat

SEQ ID NO: 569 - DNA, 59 bp, synthetic construct
  source 1..59: mol_type = other DNA
tcagacgtgtgctcttccgatctnnnnnnatagttctggtacctgacattcccgattac

SEQ ID NO: 570 - DNA, 59 bp, synthetic construct
  source 1..59: mol_type = other DNA
tcagacgtgtgctcttccgatctnnnnnnatagttgcgatctcccggaagaagaaatag

SEQ ID NO: 571 - DNA, 57 bp, synthetic construct
  source 1..57: mol_type = other DNA
tcagacgtgtgctcttccgatctnnnnnnatagttgccctaacggattgtccatact

SEQ ID NO: 572 - DNA, 58 bp, synthetic construct
  source 1..58: mol_type = other DNA
tcagacgtgtgctcttccgatctnnnnnnatagttccggctagtcaagcagacttaat

SEQ ID NO: 573 - DNA, 58 bp, synthetic construct
  source 1..58: mol_type = other DNA
tcagacgtgtgctcttccgatctnnnnnnatagttgactgtagttcgggcagagaaag

SEQ ID NO: 574 - DNA, 57 bp, synthetic construct
  source 1..57: mol_type = other DNA
tcagacgtgtgctcttccgatctnnnnnnatagttagccaggaagcctcaagaatac

SEQ ID NO: 575 - DNA, 59 bp, synthetic construct
  source 1..59: mol_type = other DNA
tcagacgtgtgctcttccgatctnnnnnnatagttccacaagagactgaagatggaagg

SEQ ID NO: 576 - DNA, 58 bp, synthetic construct
  source 1..58: mol_type = other DNA
tcagacgtgtgctcttccgatctnnnnnnatagttctcccttgttgccgttgtaattc

SEQ ID NO: 577 - DNA, 59 bp, synthetic construct
  source 1..59: mol_type = other DNA
tcagacgtgtgctcttccgatctnnnnnnatagttcatgaactccgctgggtcataata

SEQ ID NO: 578 - DNA, 58 bp, synthetic construct
  source 1..58: mol_type = other DNA
tcagacgtgtgctcttccgatctnnnnnnatagttccttcgtctttctcccagtcttc

SEQ ID NO: 579 - DNA, 58 bp, synthetic construct
  source 1..58: mol_type = other DNA
tcagacgtgtgctcttccgatctnnnnnnatagtttgccgtttctttggagggtaata

SEQ ID NO: 580 - DNA, 59 bp, synthetic construct
  source 1..59: mol_type = other DNA
tcagacgtgtgctcttccgatctnnnnnnatagttctgtattccgtctccttggttcag

SEQ ID NO: 581 - DNA, 59 bp, synthetic construct
  source 1..59: mol_type = other DNA
tcagacgtgtgctcttccgatctnnnnnnatagttctcttgggatgttgctctcttaca

SEQ ID NO: 582 - DNA, 59 bp, synthetic construct
  source 1..59: mol_type = other DNA
tcagacgtgtgctcttccgatctnnnnnnatagttctccagtcacttggtttcccataa

SEQ ID NO: 583 - DNA, 57 bp, synthetic construct
  source 1..57: mol_type = other DNA
tcagacgtgtgctcttccgatctnnnnnnatagtttacagtgacccaccaggaaatg

SEQ ID NO: 584 - DNA, 59 bp, synthetic construct
  source 1..59: mol_type = other DNA
tcagacgtgtgctcttccgatctnnnnnnatagttgccatgaactccgtgacaataaag

SEQ ID NO: 585 - DNA, 62 bp, synthetic construct
  source 1..62: mol_type = other DNA
tcagacgtgtgctcttccgatctnnnnnnatagttgaaggacaagattaggtgggagaatag

SEQ ID NO: 586 - DNA, 60 bp, synthetic construct
  source 1..60: mol_type = other DNA
tcagacgtgtgctcttccgatctnnnnnnatagttgcatcttcatgtccagactcatact

SEQ ID NO: 587 - DNA, 59 bp, synthetic construct
  source 1..59: mol_type = other DNA
tcagacgtgtgctcttccgatctnnnnnnatagttcggacagacactccaatccaaata

SEQ ID NO: 588 - DNA, 58 bp, synthetic construct
  source 1..58: mol_type = other DNA
tcagacgtgtgctcttccgatctnnnnnnatagttgcaacctgactttcgtggtaaac

SEQ ID NO: 589 - DNA, 57 bp, synthetic construct
  source 1..57: mol_type = other DNA
tcagacgtgtgctcttccgatctnnnnnnatagttgctttagccacaaacccagaac

SEQ ID NO: 590 - DNA, 59 bp, synthetic construct
  source 1..59: mol_type = other DNA
tcagacgtgtgctcttccgatctnnnnnnatagttgacatcagacaccagcttcataca

SEQ ID NO: 591 - DNA, 57 bp, synthetic construct
  source 1..57: mol_type = other DNA
tcagacgtgtgctcttccgatctnnnnnnatagttacagtgatggtcagggtctttc

SEQ ID NO: 592 - DNA, 59 bp, synthetic construct
  source 1..59: mol_type = other DNA
tcagacgtgtgctcttccgatctnnnnnnatagttcctttcggcatactcctgctaata

SEQ ID NO: 593 - DNA, 60 bp, synthetic construct
  source 1..60: mol_type = other DNA
tcagacgtgtgctcttccgatctnnnnnnatagttgctcactcaggttctcacagaataa

SEQ ID NO: 594 - DNA, 59 bp, synthetic construct
  source 1..59: mol_type = other DNA
tcagacgtgtgctcttccgatctnnnnnnatagttgggtctcctcttcatcctgatact

SEQ ID NO: 595 - DNA, 58 bp, synthetic construct
  source 1..58: mol_type = other DNA
tcagacgtgtgctcttccgatctnnnnnnatagttagttcttcagacttgcccttctc

SEQ ID NO: 596 - DNA, 58 bp, synthetic construct
  source 1..58: mol_type = other DNA
tcagacgtgtgctcttccgatctnnnnnnatagttcctttgctcttggtcaggatttg

SEQ ID NO: 597 - DNA, 59 bp, synthetic construct
  source 1..59: mol_type = other DNA
tcagacgtgtgctcttccgatctnnnnnnatagttcccataggaccagacatcactttc

SEQ ID NO: 598 - DNA, 59 bp, synthetic construct
  source 1..59: mol_type = other DNA
tcagacgtgtgctcttccgatctnnnnnnatagttcccataacagaggtccaccaatac

SEQ ID NO: 599 - DNA, 59 bp, synthetic construct
  source 1..59: mol_type = other DNA
tcagacgtgtgctcttccgatctnnnnnnatagttcatatcggatgtgggtggtcatag

SEQ ID NO: 600 - DNA, 59 bp, synthetic construct
  source 1..59: mol_type = other DNA
tcagacgtgtgctcttccgatctnnnnnnatagttcagaaccaggaaggaaggtgatac

SEQ ID NO: 601 - DNA, 57 bp, synthetic construct
  source 1..57: mol_type = other DNA
tcagacgtgtgctcttccgatctnnnnnnatagttctgtggaaggctcctcgttaaa

SEQ ID NO: 602 - DNA, 59 bp, synthetic construct
  source 1..59: mol_type = other DNA
tcagacgtgtgctcttccgatctnnnnnnatagttgagcacagggaggtttcagtaaag

SEQ ID NO: 603 - DNA, 59 bp, synthetic construct
  source 1..59: mol_type = other DNA
tcagacgtgtgctcttccgatctnnnnnnatagttccatgtcccattgtctttgttgtc

SEQ ID NO: 604 - DNA, 57 bp, synthetic construct
  source 1..57: mol_type = other DNA
tcagacgtgtgctcttccgatctnnnnnnatagttgggagcatcttcacccagttta

SEQ ID NO: 605 - DNA, 59 bp, synthetic construct
  source 1..59: mol_type = other DNA
tcagacgtgtgctcttccgatctnnnnnnatagttcagagactaagacaggctggattg

SEQ ID NO: 606 - DNA, 58 bp, synthetic construct
  source 1..58: mol_type = other DNA
tcagacgtgtgctcttccgatctnnnnnnatagttcacatcgaatgggcagagtagaa

SEQ ID NO: 607 - DNA, 58 bp, synthetic construct
  source 1..58: mol_type = other DNA
tcagacgtgtgctcttccgatctnnnnnnatagttctctctgcctggagaagattagg

SEQ ID NO: 608 - DNA, 57 bp, synthetic construct
  source 1..57: mol_type = other DNA
tcagacgtgtgctcttccgatctnnnnnnatagttagcaggcaaatccagtcctatc

SEQ ID NO: 609 - DNA, 58 bp, synthetic construct
  source 1..58: mol_type = other DNA
tcagacgtgtgctcttccgatctnnnnnnatagttccgtggtaaactctgtccgatac

SEQ ID NO: 610 - DNA, 58 bp, synthetic construct
  source 1..58: mol_type = other DNA
tcagacgtgtgctcttccgatctnnnnnnatagttggccctcatctttctggctatac

SEQ ID NO: 611 - DNA, 58 bp, synthetic construct
  source 1..58: mol_type = other DNA
tcagacgtgtgctcttccgatctnnnnnnatagttcgaacattcctgagtggctaaga

SEQ ID NO: 612 - DNA, 58 bp, synthetic construct
  source 1..58: mol_type = other DNA
tcagacgtgtgctcttccgatctnnnnnnatagtttactcagtgggttgcgtacattc

SEQ ID NO: 613 - DNA, 59 bp, synthetic construct
  source 1..59: mol_type = other DNA
tcagacgtgtgctcttccgatctnnnnnnatagttcgtgtccacttgattgcacttatc

SEQ ID NO: 614 - DNA, 58 bp, synthetic construct
  source 1..58: mol_type = other DNA
tcagacgtgtgctcttccgatctnnnnnnatagttttgtcctcctttccctgagattg

SEQ ID NO: 615 - DNA, 59 bp, synthetic construct
  source 1..59: mol_type = other DNA
tcagacgtgtgctcttccgatctnnnnnnatagtttcagaggagagaagggttcctaat

SEQ ID NO: 616 - DNA, 59 bp, synthetic construct
  source 1..59: mol_type = other DNA
tcagacgtgtgctcttccgatctnnnnnnatagttgggtgaggtgacaaagaagtagaa

SEQ ID NO: 617 - DNA, 59 bp, synthetic construct
  source 1..59: mol_type = other DNA
tcagacgtgtgctcttccgatctnnnnnnatagttgccagtctttgcagtcctttattc

SEQ ID NO: 618 - DNA, 57 bp, synthetic construct
  source 1..57: mol_type = other DNA
tcagacgtgtgctcttccgatctnnnnnnatagttaggagggtttagggaggaaaga

SEQ ID NO: 619 - DNA, 57 bp, synthetic construct
  source 1..57: mol_type = other DNA
tcagacgtgtgctcttccgatctnnnnnnatagtttccggaagaggtaagccataga

SEQ ID NO: 620 - DNA, 56 bp, synthetic construct
  source 1..56: mol_type = other DNA
tcagacgtgtgctcttccgatctnnnnnnatagttgatcttgctgcccacgtagaa

SEQ ID NO: 621 - DNA, 59 bp, synthetic construct
  source 1..59: mol_type = other DNA
tcagacgtgtgctcttccgatctnnnnnnatagttggactacaagggtgaacagctatc

SEQ ID NO: 622 - DNA, 59 bp, synthetic construct
  source 1..59: mol_type = other DNA
tcagacgtgtgctcttccgatctnnnnnnatagttcaggataagggcctagtgatgaac

SEQ ID NO: 623 - DNA, 59 bp, synthetic construct
  source 1..59: mol_type = other DNA
tcagacgtgtgctcttccgatctnnnnnnatagttggaacaccctgtctctgtagaatg

SEQ ID NO: 624 - DNA, 59 bp, synthetic construct
  source 1..59: mol_type = other DNA
tcagacgtgtgctcttccgatctnnnnnnatagttaaaggatctccctggtttctcttc

SEQ ID NO: 625 - DNA, 59 bp, synthetic construct
  source 1..59: mol_type = other DNA
tcagacgtgtgctcttccgatctnnnnnnatagtttgggagggttaagcatcatacatc

SEQ ID NO: 626 - DNA, 58 bp, synthetic construct
  source 1..58: mol_type = other DNA
tcagacgtgtgctcttccgatctnnnnnnatagttgggtcacattgaaggcaagaaag

SEQ ID NO: 627 - DNA, 57 bp, synthetic construct
  source 1..57: mol_type = other DNA
tcagacgtgtgctcttccgatctnnnnnnatagtttgcaagtgaagtcggtgtagtt

SEQ ID NO: 628 - DNA, 57 bp, synthetic construct
  source 1..57: mol_type = other DNA
tcagacgtgtgctcttccgatctnnnnnnatagttagaggaaagagctggacctgta

SEQ ID NO: 629 - DNA, 59 bp, synthetic construct
  source 1..59: mol_type = other DNA
tcagacgtgtgctcttccgatctnnnnnnatagttggactgaacctctgaacctgtaag

SEQ ID NO: 630 - DNA, 57 bp, synthetic construct
  source 1..57: mol_type = other DNA
tcagacgtgtgctcttccgatctnnnnnnatagttcagtgtggacatgggacctaaa

SEQ ID NO: 631 - DNA, 59 bp, synthetic construct
  source 1..59: mol_type = other DNA
tcagacgtgtgctcttccgatctnnnnnnatagttgtgtctagggtggacttgaagatg

SEQ ID NO: 632 - DNA, 57 bp, synthetic construct
  source 1..57: mol_type = other DNA
tcagacgtgtgctcttccgatctnnnnnnatagttggatgccgtctatgtcgtcttt

SEQ ID NO: 633 - DNA, 59 bp, synthetic construct
  source 1..59: mol_type = other DNA
tcagacgtgtgctcttccgatctnnnnnnatagttgggagtcatagcccatctttaacc

SEQ ID NO: 634 - DNA, 59 bp, synthetic construct
  source 1..59: mol_type = other DNA
tcagacgtgtgctcttccgatctnnnnnnatagttgaagttcagtgggatctgcatact

SEQ ID NO: 635 - DNA, 60 bp, synthetic construct
  source 1..60: mol_type = other DNA
tcagacgtgtgctcttccgatctnnnnnnatagttgccatgaggaacattcagactttag

SEQ ID NO: 636 - DNA, 61 bp, synthetic construct
  source 1..61: mol_type = other DNA
tcagacgtgtgctcttccgatctnnnnnnatagttgaaattccaagttcctggctcattac

SEQ ID NO: 637 - DNA, 60 bp, synthetic construct
  source 1..60: mol_type = other DNA
tcagacgtgtgctcttccgatctnnnnnnatagtttgggtagagtgggaggtacatatag

SEQ ID NO: 638 - DNA, 59 bp, synthetic construct
  source 1..59: mol_type = other DNA
tcagacgtgtgctcttccgatctnnnnnnatagttctctcccatgtcatcatccatctc

SEQ ID NO: 639 - DNA, 59 bp, synthetic construct
  source 1..59: mol_type = other DNA
tcagacgtgtgctcttccgatctnnnnnnatagttggagacacgcgtcctataactaaa

SEQ ID NO: 640 - DNA, 57 bp, synthetic construct
  source 1..57: mol_type = other DNA
tcagacgtgtgctcttccgatctnnnnnnatagttaggtatgtcaggcgctgtaatg

SEQ ID NO: 641 - DNA, 59 bp, synthetic construct
  source 1..59: mol_type = other DNA
tcagacgtgtgctcttccgatctnnnnnnatagttcacacacacagagagagcataaga

SEQ ID NO: 642 - DNA, 59 bp, synthetic construct
  source 1..59: mol_type = other DNA
tcagacgtgtgctcttccgatctnnnnnnatagttcctggattatctcccagtgttgaa

SEQ ID NO: 643 - DNA, 58 bp, synthetic construct
  source 1..58: mol_type = other DNA
tcagacgtgtgctcttccgatctnnnnnnatagttgggaggagggcagaagaataaat

SEQ ID NO: 644 - DNA, 59 bp, synthetic construct
  source 1..59: mol_type = other DNA
tcagacgtgtgctcttccgatctnnnnnnatagttgactctctgtggattgggaagaag

SEQ ID NO: 645 - DNA, 59 bp, synthetic construct
  source 1..59: mol_type = other DNA
tcagacgtgtgctcttccgatctnnnnnnatagttgtcatcatggaaaggagggataca

SEQ ID NO: 646 - DNA, 56 bp, synthetic construct
  source 1..56: mol_type = other DNA
tcagacgtgtgctcttccgatctnnnnnnatagttggcttccctggtgcctataaa

SEQ ID NO: 647 - DNA, 58 bp, synthetic construct
  source 1..58: mol_type = other DNA
tcagacgtgtgctcttccgatctnnnnnnatagttgggctgaaaggcagttagtagaa

SEQ ID NO: 648 - DNA, 59 bp, synthetic construct
  source 1..59: mol_type = other DNA
tcagacgtgtgctcttccgatctnnnnnnatagttggacgacaggagattggatgatag

SEQ ID NO: 649 - DNA, 57 bp, synthetic construct
  source 1..57: mol_type = other DNA
tcagacgtgtgctcttccgatctnnnnnnatagtttctcctggtttccgccatttag

SEQ ID NO: 650 - DNA, 58 bp, synthetic construct
  source 1..58: mol_type = other DNA
tcagacgtgtgctcttccgatctnnnnnnatagttcacaccagtaccagatggctaaa

SEQ ID NO: 651 - DNA, 59 bp, synthetic construct
  source 1..59: mol_type = other DNA
tcagacgtgtgctcttccgatctnnnnnnatagttcctccttgtcttctgcgtctaaat

SEQ ID NO: 652 - DNA, 57 bp, synthetic construct
  source 1..57: mol_type = other DNA
tcagacgtgtgctcttccgatctnnnnnnatagttgggcagtgaagtggtttgaatg

SEQ ID NO: 653 - DNA, 57 bp, synthetic construct
  source 1..57: mol_type = other DNA
tcagacgtgtgctcttccgatctnnnnnnatagttttaggtgaggtctggctctgta

SEQ ID NO: 654 - DNA, 57 bp, synthetic construct
  source 1..57: mol_type = other DNA
tcagacgtgtgctcttccgatctnnnnnnatagttagttggagaggttgccgtattt

SEQ ID NO: 655 - DNA, 58 bp, synthetic construct
  source 1..58: mol_type = other DNA
tcagacgtgtgctcttccgatctnnnnnnatagttccttgagtgtaacaggccattct

SEQ ID NO: 656 - DNA, 58 bp, synthetic construct
  source 1..58: mol_type = other DNA
tcagacgtgtgctcttccgatctnnnnnnatagttggtagagcacgtcttccttcatt

SEQ ID NO: 657 - DNA, 59 bp, synthetic construct
  source 1..59: mol_type = other DNA
tcagacgtgtgctcttccgatctnnnnnnatagttgtacttgtagctggacctgttctt

SEQ ID NO: 658 - DNA, 56 bp, synthetic construct
  source 1..56: mol_type = other DNA
tcagacgtgtgctcttccgatctnnnnnnatagttaaggcaggtagagagccaaag

SEQ ID NO: 659 - DNA, 59 bp, synthetic construct
  source 1..59: mol_type = other DNA
tcagacgtgtgctcttccgatctnnnnnnatagttcttagtgcgtaggagaggcattag

SEQ ID NO: 660 - DNA, 59 bp, synthetic construct
  source 1..59: mol_type = other DNA
tcagacgtgtgctcttccgatctnnnnnnatagttcagttcttaggctctgggttagtg

SEQ ID NO: 661 - DNA, 59 bp, synthetic construct
  source 1..59: mol_type = other DNA
tcagacgtgtgctcttccgatctnnnnnnatagttagcttatcacatgactgaggtctg

SEQ ID NO: 662 - DNA, 59 bp, synthetic construct
  source 1..59: mol_type = other DNA
tcagacgtgtgctcttccgatctnnnnnnatagttgaagtgtagggagacaggacaaac

SEQ ID NO: 663 - DNA, 58 bp, synthetic construct
  source 1..58: mol_type = other DNA
tcagacgtgtgctcttccgatctnnnnnnatagttgagtggagaagaagggaggaaag

SEQ ID NO: 664 - DNA, 59 bp, synthetic construct
  source 1..59: mol_type = other DNA
tcagacgtgtgctcttccgatctnnnnnnatagttgagtctcacctactgcactgattt

SEQ ID NO: 665 - DNA, 58 bp, synthetic construct
  source 1..58: mol_type = other DNA
tcagacgtgtgctcttccgatctnnnnnnatagttctgtgacagctggactccataac

SEQ ID NO: 666 - DNA, 56 bp, synthetic construct
  source 1..56: mol_type = other DNA
tcagacgtgtgctcttccgatctnnnnnnatagtttggttggtggtgttcctcttt

SEQ ID NO: 667 - DNA, 60 bp, synthetic construct
  source 1..60: mol_type = other DNA
tcagacgtgtgctcttccgatctnnnnnnatagttactaggagtaggaaggtggtcatag

SEQ ID NO: 668 - DNA, 59 bp, synthetic construct
  source 1..59: mol_type = other DNA
tcagacgtgtgctcttccgatctnnnnnnatagttgccacaccaacaaaccatctttat

SEQ ID NO: 669 - DNA, 58 bp, synthetic construct
  source 1..58: mol_type = other DNA
tcagacgtgtgctcttccgatctnnnnnnatagttcctaaatcctgggtgggaagaaa

SEQ ID NO: 670 - DNA, 57 bp, synthetic construct
  source 1..57: mol_type = other DNA
tcagacgtgtgctcttccgatctnnnnnnatagttttggctgggatgagggattatg

SEQ ID NO: 671 - DNA, 57 bp, synthetic construct
  source 1..57: mol_type = other DNA
tcagacgtgtgctcttccgatctnnnnnnatagttgatgaggtctgccacggattta

SEQ ID NO: 672 - DNA, 59 bp, synthetic construct
  source 1..59: mol_type = other DNA
tcagacgtgtgctcttccgatctnnnnnnatagttgggcttcttgaataccacctactc

SEQ ID NO: 673 - DNA, 57 bp, synthetic construct
  source 1..57: mol_type = other DNA
tcagacgtgtgctcttccgatctnnnnnnatagttggctgtgtgtcctgcatctaat

SEQ ID NO: 674 - DNA, 57 bp, synthetic construct
  source 1..57: mol_type = other DNA
tcagacgtgtgctcttccgatctnnnnnnatagtttgcctttgcatctctgtcttct

SEQ ID NO: 675 - DNA, 59 bp, synthetic construct
  source 1..59: mol_type = other DNA
tcagacgtgtgctcttccgatctnnnnnnatagttgtctgtcataatctcccaccatcc

SEQ ID NO: 676 - DNA, 60 bp, synthetic construct
  source 1..60: mol_type = other DNA
tcagacgtgtgctcttccgatctnnnnnnatagtttggaccggatcctaaacacatattc

SEQ ID NO: 677 - DNA, 59 bp, synthetic construct
  source 1..59: mol_type = other DNA
tcagacgtgtgctcttccgatctnnnnnnatagttccaaggatcagatgtgagacagag

SEQ ID NO: 678 - DNA, 60 bp, synthetic construct
  source 1..60: mol_type = other DNA
tcagacgtgtgctcttccgatctnnnnnnatagttggttggacacctgaatgctaatttc

SEQ ID NO: 679 - DNA, 59 bp, synthetic construct
  source 1..59: mol_type = other DNA
tcagacgtgtgctcttccgatctnnnnnnatagtttctccacttcgagcatgtcaataa

SEQ ID NO: 680 - DNA, 58 bp, synthetic construct
  source 1..58: mol_type = other DNA
tcagacgtgtgctcttccgatctnnnnnnatagttcatggtggcacacacctttaatc

SEQ ID NO: 681 - DNA, 60 bp, synthetic construct
  source 1..60: mol_type = other DNA
tcagacgtgtgctcttccgatctnnnnnnatagttgatcgaatgaggacatgctggatag

SEQ ID NO: 682 - DNA, 58 bp, synthetic construct
  source 1..58: mol_type = other DNA
tcagacgtgtgctcttccgatctnnnnnnatagttgagtaggtaggctctgcgaaatg

SEQ ID NO: 683 - DNA, 59 bp, synthetic construct
  source 1..59: mol_type = other DNA
tcagacgtgtgctcttccgatctnnnnnnatagttctagtgtgagttggcttctccatc

SEQ ID NO: 684 - DNA, 59 bp, synthetic construct
  source 1..59: mol_type = other DNA
tcagacgtgtgctcttccgatctnnnnnnatagttcagctcagaaacaggaggactatg

SEQ ID NO: 685 - DNA, 59 bp, synthetic construct
  source 1..59: mol_type = other DNA
tcagacgtgtgctcttccgatctnnnnnnatagttggaacaagtaccgacctgtctatc

SEQ ID NO: 686 - DNA, 59 bp, synthetic construct
  source 1..59: mol_type = other DNA
tcagacgtgtgctcttccgatctnnnnnnatagttctagctcagaatccacaggaaaca

SEQ ID NO: 687 - DNA, 59 bp, synthetic construct
  source 1..59: mol_type = other DNA
tcagacgtgtgctcttccgatctnnnnnnatagtttgtgtggatggtgatggcataata

SEQ ID NO: 688 - DNA, 57 bp, synthetic construct
  source 1..57: mol_type = other DNA
tcagacgtgtgctcttccgatctnnnnnnatagttggtcgagaccgtggtttcatta

SEQ ID NO: 689 - DNA, 58 bp, synthetic construct
  source 1..58: mol_type = other DNA
tcagacgtgtgctcttccgatctnnnnnnatagttgctaggttctcagcttcctcatt

SEQ ID NO: 690 - DNA, 58 bp, synthetic construct
  source 1..58: mol_type = other DNA
tcagacgtgtgctcttccgatctnnnnnnatagttgggcagatcagtccttccataaa

SEQ ID NO: 691 - DNA, 58 bp, synthetic construct
  source 1..58: mol_type = other DNA
tcagacgtgtgctcttccgatctnnnnnnatagttgctcaggtatggtcctggataac

SEQ ID NO: 692 - DNA, 58 bp, synthetic construct
  source 1..58: mol_type = other DNA
tcagacgtgtgctcttccgatctnnnnnnatagttgccatccttctccatgcttatct

SEQ ID NO: 693 - DNA, 59 bp, synthetic construct
  source 1..59: mol_type = other DNA
tcagacgtgtgctcttccgatctnnnnnnatagttaggacggagactatgaggatgatg

SEQ ID NO: 694 - DNA, 59 bp, synthetic construct
  source 1..59: mol_type = other DNA
tcagacgtgtgctcttccgatctnnnnnnatagttgtcacgcgttggatcctagaatta

SEQ ID NO: 695 - DNA, 60 bp, synthetic construct
  source 1..60: mol_type = other DNA
tcagacgtgtgctcttccgatctnnnnnnatagttgtgatgtagcagggagagttgttag

SEQ ID NO: 696 - DNA, 59 bp, synthetic construct
  source 1..59: mol_type = other DNA
tcagacgtgtgctcttccgatctnnnnnnatagttcatccacgatcttacgggtagttg

SEQ ID NO: 697 - DNA, 58 bp, synthetic construct
  source 1..58: mol_type = other DNA
tcagacgtgtgctcttccgatctnnnnnnatagttgctgaacactgaggagacaagaa

SEQ ID NO: 698 - DNA, 58 bp, synthetic construct
  source 1..58: mol_type = other DNA
tcagacgtgtgctcttccgatctnnnnnnatagttgttctcgttccggtctactttcc

SEQ ID NO: 699 - DNA, 57 bp, synthetic construct
  source 1..57: mol_type = other DNA
tcagacgtgtgctcttccgatctnnnnnnatagttacaaggatgtgggttgggtatg

SEQ ID NO: 700 - DNA, 59 bp, synthetic construct
  source 1..59: mol_type = other DNA
tcagacgtgtgctcttccgatctnnnnnnatagttgaagtgacagggatggagtgaaag

SEQ ID NO: 701 - DNA, 57 bp, synthetic construct
  source 1..57: mol_type = other DNA
tcagacgtgtgctcttccgatctnnnnnnatagttgctctgaacttgcagacaaagg

SEQ ID NO: 702 - DNA, 57 bp, synthetic construct
  source 1..57: mol_type = other DNA
tcagacgtgtgctcttccgatctnnnnnnatagttcaggtggtcctgcaaggtatta

SEQ ID NO: 703 - DNA, 57 bp, synthetic construct
  source 1..57: mol_type = other DNA
tcagacgtgtgctcttccgatctnnnnnnatagttctctgtggtcattgcggtatct

SEQ ID NO: 704 - DNA, 57 bp, synthetic construct
  source 1..57: mol_type = other DNA
tcagacgtgtgctcttccgatctnnnnnnatagtttctcatcgccctcttcacattc

SEQ ID NO: 705 - DNA, 59 bp, synthetic construct
  source 1..59: mol_type = other DNA
tcagacgtgtgctcttccgatctnnnnnnatagttccatcacctcacaggtcaaagtat

SEQ ID NO: 706 - DNA, 59 bp, synthetic construct
  source 1..59: mol_type = other DNA
tcagacgtgtgctcttccgatctnnnnnnatagttagttccttagtatgggtcgctttg

SEQ ID NO: 707 - DNA, 59 bp, synthetic construct
  source 1..59: mol_type = other DNA
tcagacgtgtgctcttccgatctnnnnnnatagttgcatcagagggcaggtagataaat

SEQ ID NO: 708 - DNA, 55 bp, synthetic construct
  source 1..55: mol_type = other DNA
tcagacgtgtgctcttccgatctnnnnnnatagttagcccagaagttggacgaaa

SEQ ID NO: 709 - DNA, 59 bp, synthetic construct
  source 1..59: mol_type = other DNA
tcagacgtgtgctcttccgatctnnnnnnatagttgtgttggctgtgaggtctttattc

SEQ ID NO: 710 - DNA, 59 bp, synthetic construct
  source 1..59: mol_type = other DNA
tcagacgtgtgctcttccgatctnnnnnnatagttcttgatgtagccagttctctcagg

SEQ ID NO: 711 - DNA, 59 bp, synthetic construct
  source 1..59: mol_type = other DNA
tcagacgtgtgctcttccgatctnnnnnnatagttgggacaaccataaaccaccataga

SEQ ID NO: 712 - DNA, 58 bp, synthetic construct
  source 1..58: mol_type = other DNA
tcagacgtgtgctcttccgatctnnnnnnatagtttttggacttcttgtgccatttcc

SEQ ID NO: 713 - DNA, 60 bp, synthetic construct
  source 1..60: mol_type = other DNA
tcagacgtgtgctcttccgatctnnnnnnatagttcagtcgatcctccaggaatgaatac

SEQ ID NO: 714 - DNA, 59 bp, synthetic construct
  source 1..59: mol_type = other DNA
tcagacgtgtgctcttccgatctnnnnnnatagttggagtagacaaggtacaacccatc

SEQ ID NO: 715 - DNA, 57 bp, synthetic construct
  source 1..57: mol_type = other DNA
tcagacgtgtgctcttccgatctnnnnnnatagttagagaagccatgtcggagaaag

SEQ ID NO: 716 - DNA, 56 bp, synthetic construct
  source 1..56: mol_type = other DNA
tcagacgtgtgctcttccgatctnnnnnnatagttttggtggttggctcagaagat

SEQ ID NO: 717 - DNA, 60 bp, synthetic construct
  source 1..60: mol_type = other DNA
tcagacgtgtgctcttccgatctnnnnnnatagttgtgggatctggcacaaagatataga

SEQ ID NO: 718 - DNA, 57 bp, synthetic construct
  source 1..57: mol_type = other DNA
tcagacgtgtgctcttccgatctnnnnnnatagttcctgggcttcatcacacctatc

SEQ ID NO: 719 - DNA, 59 bp, synthetic construct
  source 1..59: mol_type = other DNA
tcagacgtgtgctcttccgatctnnnnnnatagttcacacacacacacattcacataca

SEQ ID NO: 720 - DNA, 58 bp, synthetic construct
  source 1..58: mol_type = other DNA
tcagacgtgtgctcttccgatctnnnnnnatagttcacacacacacacaccacataaa

SEQ ID NO: 721 - DNA, 60 bp, synthetic construct
  source 1..60: mol_type = other DNA
tcagacgtgtgctcttccgatctnnnnnnatagttggtaaagtgtagattggagggaaca

SEQ ID NO: 722 - DNA, 58 bp, synthetic construct
  source 1..58: mol_type = other DNA
tcagacgtgtgctcttccgatctnnnnnnatagttgacagtggcgctgcatagtataa

SEQ ID NO: 723 - DNA, 59 bp, synthetic construct
  source 1..59: mol_type = other DNA
tcagacgtgtgctcttccgatctnnnnnnatagttcatctatcttgccctccttgatgt

SEQ ID NO: 724 - DNA, 59 bp, synthetic construct
  source 1..59: mol_type = other DNA
tcagacgtgtgctcttccgatctnnnnnnatagttccgttgctcttcagtagctctatc

SEQ ID NO: 725 - DNA, 57 bp, synthetic construct
  source 1..57: mol_type = other DNA
tcagacgtgtgctcttccgatctnnnnnnatagttccgcatccatcacatcgtagag

SEQ ID NO: 726 - DNA, 59 bp, synthetic construct
  source 1..59: mol_type = other DNA
tcagacgtgtgctcttccgatctnnnnnnatagttgtcctcccactaactgctctagta

SEQ ID NO: 727 - DNA, 57 bp, synthetic construct
  source 1..57: mol_type = other DNA
tcagacgtgtgctcttccgatctnnnnnnatagttgatggcagctctgggagataaa

SEQ ID NO: 728 - DNA, 59 bp, synthetic construct
  source 1..59: mol_type = other DNA
tcagacgtgtgctcttccgatctnnnnnnatagttgatcgatctctgcctggactttag

SEQ ID NO: 729 - DNA, 59 bp, synthetic construct
  source 1..59: mol_type = other DNA
tcagacgtgtgctcttccgatctnnnnnnatagttcactacgcacggagattccttaat

SEQ ID NO: 730 - DNA, 59 bp, synthetic construct
  source 1..59: mol_type = other DNA
tcagacgtgtgctcttccgatctnnnnnnatagttccaccgttcttggagttgtagtag

SEQ ID NO: 731 - DNA, 58 bp, synthetic construct
  source 1..58: mol_type = other DNA
tcagacgtgtgctcttccgatctnnnnnnatagttctgagccacccaggaaagtataa

SEQ ID NO: 732 - DNA, 57 bp, synthetic construct
  source 1..57: mol_type = other DNA
tcagacgtgtgctcttccgatctnnnnnnatagttgcttgtggtaggcagtcgatta

SEQ ID NO: 733 - DNA, 58 bp, synthetic construct
  source 1..58: mol_type = other DNA
tcagacgtgtgctcttccgatctnnnnnnatagttgcaaatggctggtctggtttatt

SEQ ID NO: 734 - DNA, 59 bp, synthetic construct
  source 1..59: mol_type = other DNA
tcagacgtgtgctcttccgatctnnnnnnatagttgctctccaggtacaccatgttatt

SEQ ID NO: 735 - DNA, 59 bp, synthetic construct
  source 1..59: mol_type = other DNA
tcagacgtgtgctcttccgatctnnnnnnatagttctccttctgtgactccagcttatc

SEQ ID NO: 736 - DNA, 58 bp, synthetic construct
  source 1..58: mol_type = other DNA
tcagacgtgtgctcttccgatctnnnnnnatagttgctgaggaactggtcaggaataa

SEQ ID NO: 737 - DNA, 59 bp, synthetic construct
  source 1..59: mol_type = other DNA
tcagacgtgtgctcttccgatctnnnnnnatagttgcttcttcctgacatactccactt

SEQ ID NO: 738 - DNA, 60 bp, synthetic construct
  source 1..60: mol_type = other DNA
tcagacgtgtgctcttccgatctnnnnnnatagttggtgttgaagagcagaaagcaataa

SEQ ID NO: 739 - DNA, 57 bp, synthetic construct
  source 1..57: mol_type = other DNA
tcagacgtgtgctcttccgatctnnnnnnatagttctgcctctgaatccacattcct

SEQ ID NO: 740 - DNA, 59 bp, synthetic construct
  source 1..59: mol_type = other DNA
tcagacgtgtgctcttccgatctnnnnnnatagttgatcagacttgagctgcgagatag

SEQ ID NO: 741 - DNA, 58 bp, synthetic construct
  source 1..58: mol_type = other DNA
tcagacgtgtgctcttccgatctnnnnnnatagttggagtgtgttgtccagagcatag

SEQ ID NO: 742 - DNA, 58 bp, synthetic construct
  source 1..58: mol_type = other DNA
tcagacgtgtgctcttccgatctnnnnnnatagtttctgggtagctgaatcgcataag

SEQ ID NO: 743 - DNA, 59 bp, synthetic construct
  source 1..59: mol_type = other DNA
tcagacgtgtgctcttccgatctnnnnnnatagttctgtgggacgacactgatacatag

SEQ ID NO: 744 - DNA, 58 bp, synthetic construct
  source 1..58: mol_type = other DNA
tcagacgtgtgctcttccgatctnnnnnnatagtttgggtcagatgtcagtggataac

SEQ ID NO: 745 - DNA, 59 bp, synthetic construct
  source 1..59: mol_type = other DNA
tcagacgtgtgctcttccgatctnnnnnnatagttcaggtaacaggtctctcccataaa

SEQ ID NO: 746 - DNA, 59 bp, synthetic construct
  source 1..59: mol_type = other DNA
tcagacgtgtgctcttccgatctnnnnnnatagttactctggctgagaacgatgattag

SEQ ID NO: 747 - DNA, 59 bp, synthetic construct
  source 1..59: mol_type = other DNA
tcagacgtgtgctcttccgatctnnnnnnatagttgcctgggtccagtagaattaagag

SEQ ID NO: 748 - DNA, 58 bp, synthetic construct
  source 1..58: mol_type = other DNA
tcagacgtgtgctcttccgatctnnnnnnatagttcttgggtaagcagccgagataaa

SEQ ID NO: 749 - DNA, 57 bp, synthetic construct
  source 1..57: mol_type = other DNA
tcagacgtgtgctcttccgatctnnnnnnatagttcagacttccgttggtggattct

SEQ ID NO: 750 - DNA, 59 bp, synthetic construct
  source 1..59: mol_type = other DNA
tcagacgtgtgctcttccgatctnnnnnnatagttgacaagtccactgggacacaaatc

SEQ ID NO: 751 - DNA, 59 bp, synthetic construct
  source 1..59: mol_type = other DNA
tcagacgtgtgctcttccgatctnnnnnnatagttgtctgggtttggtggttgtttatg

SEQ ID NO: 752 - DNA, 57 bp, synthetic construct
  source 1..57: mol_type = other DNA
tcagacgtgtgctcttccgatctnnnnnnatagtttgaataggtcacggtgcgtaag

SEQ ID NO: 753 - DNA, 59 bp, synthetic construct
  source 1..59: mol_type = other DNA
tcagacgtgtgctcttccgatctnnnnnnatagttctgggtaagtgactccacagaaag

SEQ ID NO: 754 - DNA, 58 bp, synthetic construct
  source 1..58: mol_type = other DNA
tcagacgtgtgctcttccgatctnnnnnnatagttcctttggcctgacgtcctattta

SEQ ID NO: 755 - DNA, 58 bp, synthetic construct
  source 1..58: mol_type = other DNA
tcagacgtgtgctcttccgatctnnnnnnatagttggagagcctcgttcacctttaat

SEQ ID NO: 756 - DNA, 57 bp, synthetic construct
  source 1..57: mol_type = other DNA
tcagacgtgtgctcttccgatctnnnnnnatagttcctgtgttaggctctcctttgt

SEQ ID NO: 757 - DNA, 59 bp, synthetic construct
  source 1..59: mol_type = other DNA
tcagacgtgtgctcttccgatctnnnnnnatagttggaacactttctgttgtgggtttc

SEQ ID NO: 758 - DNA, 59 bp, synthetic construct
  source 1..59: mol_type = other DNA
tcagacgtgtgctcttccgatctnnnnnnatagttctgctgatctttctcagggtatgg

SEQ ID NO: 759 - DNA, 59 bp, synthetic construct
  source 1..59: mol_type = other DNA
tcagacgtgtgctcttccgatctnnnnnnatagttaattgtccttactgggctgtagtt

SEQ ID NO: 760 - DNA, 59 bp, synthetic construct
  source 1..59: mol_type = other DNA
tcagacgtgtgctcttccgatctnnnnnnatagttcagactcccagttcacacagatac

SEQ ID NO: 761 - DNA, 59 bp, synthetic construct
  source 1..59: mol_type = other DNA
tcagacgtgtgctcttccgatctnnnnnnatagtttctggtaatacagttgggcacttc

SEQ ID NO: 762 - DNA, 59 bp, synthetic construct
  source 1..59: mol_type = other DNA
tcagacgtgtgctcttccgatctnnnnnnatagttgagatgagctgcttaacgagtgag

SEQ ID NO: 763 - DNA, 60 bp, synthetic construct
  source 1..60: mol_type = other DNA
tcagacgtgtgctcttccgatctnnnnnnatagttcattgcaggagaagtgacagataga

SEQ ID NO: 764 - DNA, 58 bp, synthetic construct
  source 1..58: mol_type = other DNA
tcagacgtgtgctcttccgatctnnnnnnatagttcccacccagatccatacgttatt

SEQ ID NO: 765 - DNA, 59 bp, synthetic construct
  source 1..59: mol_type = other DNA
tcagacgtgtgctcttccgatctnnnnnnatagtttggtggaggttgacagagaataac

SEQ ID NO: 766 - DNA, 58 bp, synthetic construct
  source 1..58: mol_type = other DNA
tcagacgtgtgctcttccgatctnnnnnnatagttcgggatgcttgagaagtgagtag

SEQ ID NO: 767 - DNA, 59 bp, synthetic construct
  source 1..59: mol_type = other DNA
tcagacgtgtgctcttccgatctnnnnnnatagttggtaactgctcctctgagtctttg

SEQ ID NO: 768 - DNA, 60 bp, synthetic construct
  source 1..60: mol_type = other DNA
tcagacgtgtgctcttccgatctnnnnnnatagttcatctctggtctcaaccgtcttaat

SEQ ID NO: 769 - DNA, 59 bp, synthetic construct
  source 1..59: mol_type = other DNA
tcagacgtgtgctcttccgatctnnnnnnatagttgaccttatgttcaggagtggtctg

SEQ ID NO: 770 - DNA, 59 bp, synthetic construct
  source 1..59: mol_type = other DNA
tcagacgtgtgctcttccgatctnnnnnnatagttccctagacacaggcttctgaatac

SEQ ID NO: 771 - DNA, 58 bp, synthetic construct
  source 1..58: mol_type = other DNA
tcagacgtgtgctcttccgatctnnnnnnatagtttccctgattggccaagagataac

SEQ ID NO: 772 - DNA, 57 bp, synthetic construct
  source 1..57: mol_type = other DNA
tcagacgtgtgctcttccgatctnnnnnnatagttgaaagatggagtggcagacaga

SEQ ID NO: 773 - DNA, 59 bp, synthetic construct
  source 1..59: mol_type = other DNA
tcagacgtgtgctcttccgatctnnnnnnatagttaaacaccaccgagaggatgataag

SEQ ID NO: 774 - DNA, 59 bp, synthetic construct
  source 1..59: mol_type = other DNA
tcagacgtgtgctcttccgatctnnnnnnatagttcttactcagaaccgtggacaagaa

SEQ ID NO: 775 - DNA, 59 bp, synthetic construct
  source 1..59: mol_type = other DNA
tcagacgtgtgctcttccgatctnnnnnnatagttttctcagagcggatgaaggtaaag

SEQ ID NO: 776 - DNA, 58 bp, synthetic construct
  source 1..58: mol_type = other DNA
tcagacgtgtgctcttccgatctnnnnnnatagttcaactcggccactccatcatatt

SEQ ID NO: 777 - DNA, 58 bp, synthetic construct
  source 1..58: mol_type = other DNA
tcagacgtgtgctcttccgatctnnnnnnatagttcctccacaaccatgtcctgataa

SEQ ID NO: 778 - DNA, 59 bp, synthetic construct
  source 1..59: mol_type = other DNA
tcagacgtgtgctcttccgatctnnnnnnatagttctagatgcccacgtgaatcctaag

SEQ ID NO: 779 - DNA, 61 bp, synthetic construct
  source 1..61: mol_type = other DNA
tcagacgtgtgctcttccgatctnnnnnnatagttactccactttgctcttgacttctatc

SEQ ID NO: 780 - DNA, 60 bp, synthetic construct
  source 1..60: mol_type = other DNA
tcagacgtgtgctcttccgatctnnnnnnatagttggtctcttccagatcatgggttatg

SEQ ID NO: 781 - DNA, 58 bp, synthetic construct
  source 1..58: mol_type = other DNA
tcagacgtgtgctcttccgatctnnnnnnatagttcaggattcatggagggcaataga

SEQ ID NO: 782 - DNA, 59 bp, synthetic construct
  source 1..59: mol_type = other DNA
tcagacgtgtgctcttccgatctnnnnnnatagtttgtgtgactccagaatgagctatg

SEQ ID NO: 783 - DNA, 60 bp, synthetic construct
  source 1..60: mol_type = other DNA
tcagacgtgtgctcttccgatctnnnnnnatagttgagagccaaagtaggtccagtaatc

SEQ ID NO: 784 - DNA, 59 bp, synthetic construct
  source 1..59: mol_type = other DNA
tcagacgtgtgctcttccgatctnnnnnnatagttgtctcttggctcatctcctgattt

SEQ ID NO: 785 - DNA, 60 bp, synthetic construct
  source 1..60: mol_type = other DNA
tcagacgtgtgctcttccgatctnnnnnnatagtttgtgttgtaagcaggaggtacatag

SEQ ID NO: 786 - DNA, 58 bp, synthetic construct
  source 1..58: mol_type = other DNA
tcagacgtgtgctcttccgatctnnnnnnatagttaggcaactctcgttcttgtgtag

SEQ ID NO: 787 - DNA, 57 bp, synthetic construct
  source 1..57: mol_type = other DNA
tcagacgtgtgctcttccgatctnnnnnnatagttccacctacacagcaaccattct

SEQ ID NO: 788 - DNA, 57 bp, synthetic construct
  source 1..57: mol_type = other DNA
tcagacgtgtgctcttccgatctnnnnnnatagtttacctgtccgctgtgtttatgg

SEQ ID NO: 789 - DNA, 57 bp, synthetic construct
  source 1..57: mol_type = other DNA
tcagacgtgtgctcttccgatctnnnnnnatagttccttgtcccaccatgctaatct

SEQ ID NO: 790 - DNA, 57 bp, synthetic construct
  source 1..57: mol_type = other DNA
tcagacgtgtgctcttccgatctnnnnnnatagttgcagccactttgccttctttac

SEQ ID NO: 791 - DNA, 59 bp, synthetic construct
  source 1..59: mol_type = other DNA
tcagacgtgtgctcttccgatctnnnnnnatagtttgttcaagactgcccagagaataa

SEQ ID NO: 792 - DNA, 59 bp, synthetic construct
  source 1..59: mol_type = other DNA
tcagacgtgtgctcttccgatctnnnnnnatagttgtgacctacgtcgttctggataag

SEQ ID NO: 793 - DNA, 59 bp, synthetic construct
  source 1..59: mol_type = other DNA
tcagacgtgtgctcttccgatctnnnnnnatagttgcaggtccaatgacaaagatgaag

SEQ ID NO: 794 - DNA, 59 bp, synthetic construct
  source 1..59: mol_type = other DNA
tcagacgtgtgctcttccgatctnnnnnnatagttcctagggataccacccttcataga

SEQ ID NO: 795 - DNA, 59 bp, synthetic construct
  source 1..59: mol_type = other DNA
tcagacgtgtgctcttccgatctnnnnnnatagttcagtcccgttactctgtcgattac

SEQ ID NO: 796 - DNA, 57 bp, synthetic construct
  source 1..57: mol_type = other DNA
tcagacgtgtgctcttccgatctnnnnnnatagttgctcgaactccttctgcttctt

SEQ ID NO: 797 - DNA, 59 bp, synthetic construct
  source 1..59: mol_type = other DNA
tcagacgtgtgctcttccgatctnnnnnnatagttctccactctggcatttcccattac

SEQ ID NO: 798 - DNA, 58 bp, synthetic construct
  source 1..58: mol_type = other DNA
tcagacgtgtgctcttccgatctnnnnnnatagttctagaacggcttgctctccttac

SEQ ID NO: 799 - DNA, 59 bp, synthetic construct
  source 1..59: mol_type = other DNA
tcagacgtgtgctcttccgatctnnnnnnatagttggacactggtcaagaagagtatgg

SEQ ID NO: 800 - DNA, 59 bp, synthetic construct
  source 1..59: mol_type = other DNA
tcagacgtgtgctcttccgatctnnnnnnatagttgtctgctgtctgctgtctacttac

SEQ ID NO: 801 - DNA, 59 bp, synthetic construct
  source 1..59: mol_type = other DNA
tcagacgtgtgctcttccgatctnnnnnnatagttcctgtcatccctcaggaagttaag

SEQ ID NO: 802 - DNA, 59 bp, synthetic construct
  source 1..59: mol_type = other DNA
tcagacgtgtgctcttccgatctnnnnnnatagttgaagtcagtgcaacttaggcaatc

SEQ ID NO: 803 - DNA, 58 bp, synthetic construct
  source 1..58: mol_type = other DNA
tcagacgtgtgctcttccgatctnnnnnnatagttgtcaaggtgtctttctgggatgt

SEQ ID NO: 804 - DNA, 60 bp, synthetic construct
  source 1..60: mol_type = other DNA
tcagacgtgtgctcttccgatctnnnnnnatagtttctcacggtctggatctacctatac

SEQ ID NO: 805 - DNA, 57 bp, synthetic construct
  source 1..57: mol_type = other DNA
tcagacgtgtgctcttccgatctnnnnnnatagttctgcatcttcctcccagatgtt

SEQ ID NO: 806 - DNA, 60 bp, synthetic construct
  source 1..60: mol_type = other DNA
tcagacgtgtgctcttccgatctnnnnnnatagttcactggcctcttctatggctattac

SEQ ID NO: 807 - DNA, 57 bp, synthetic construct
  source 1..57: mol_type = other DNA
tcagacgtgtgctcttccgatctnnnnnnatagttggtcctagtgcttctcggtttc

SEQ ID NO: 808 - DNA, 58 bp, synthetic construct
  source 1..58: mol_type = other DNA
tcagacgtgtgctcttccgatctnnnnnnatagttcatgcacatcaaaccagcctatc

SEQ ID NO: 809 - DNA, 58 bp, synthetic construct
  source 1..58: mol_type = other DNA
tcagacgtgtgctcttccgatctnnnnnnatagttggtttgggagtgttaggcaatct

SEQ ID NO: 810 - DNA, 59 bp, synthetic construct
  source 1..59: mol_type = other DNA
tcagacgtgtgctcttccgatctnnnnnnatagttgtcctccggattctcacagtaaag

SEQ ID NO: 811 - DNA, 59 bp, synthetic construct
  source 1..59: mol_type = other DNA
tcagacgtgtgctcttccgatctnnnnnnatagttatctggctcagtcttcacacttac

SEQ ID NO: 812 - DNA, 57 bp, synthetic construct
  source 1..57: mol_type = other DNA
tcagacgtgtgctcttccgatctnnnnnnatagttgagcgccagtctctatggaaat

SEQ ID NO: 813 - DNA, 60 bp, synthetic construct
  source 1..60: mol_type = other DNA
tcagacgtgtgctcttccgatctnnnnnnatagtttctcatcaaagcagggagttcataa

SEQ ID NO: 814 - DNA, 60 bp, synthetic construct
  source 1..60: mol_type = other DNA
tcagacgtgtgctcttccgatctnnnnnnatagttgcttagccaagaactgcagaaatag

SEQ ID NO: 815 - DNA, 57 bp, synthetic construct
  source 1..57: mol_type = other DNA
tcagacgtgtgctcttccgatctnnnnnnatagttccattcttcagggtggctatga

SEQ ID NO: 816 - DNA, 60 bp, synthetic construct
  source 1..60: mol_type = other DNA
tcagacgtgtgctcttccgatctnnnnnnatagttccctagacacatctgaacccaatag

SEQ ID NO: 817 - DNA, 60 bp, synthetic construct
  source 1..60: mol_type = other DNA
tcagacgtgtgctcttccgatctnnnnnnatagttgccaaggaatactgcctcagaaata

SEQ ID NO: 818 - DNA, 59 bp, synthetic construct
  source 1..59: mol_type = other DNA
tcagacgtgtgctcttccgatctnnnnnnatagttccacacatgtcctcaccctaatac

SEQ ID NO: 819 - DNA, 59 bp, synthetic construct
  source 1..59: mol_type = other DNA
tcagacgtgtgctcttccgatctnnnnnnatagttgattcagggtgcttgttggtaaag

SEQ ID NO: 820 - DNA, 56 bp, synthetic construct
  source 1..56: mol_type = other DNA
tcagacgtgtgctcttccgatctnnnnnnatagttcgcacagtccctttggagtta

SEQ ID NO: 821 - DNA, 59 bp, synthetic construct
  source 1..59: mol_type = other DNA
tcagacgtgtgctcttccgatctnnnnnnatagttccgaagttgtctccagtagcatag

SEQ ID NO: 822 - DNA, 59 bp, synthetic construct
  source 1..59: mol_type = other DNA
tcagacgtgtgctcttccgatctnnnnnnatagttataatagcaacccgccagtctatc

SEQ ID NO: 823 - DNA, 60 bp, synthetic construct
  source 1..60: mol_type = other DNA
tcagacgtgtgctcttccgatctnnnnnnatagttcctctggctcctgtagtttgaatag

SEQ ID NO: 824 - DNA, 57 bp, synthetic construct
  source 1..57: mol_type = other DNA
tcagacgtgtgctcttccgatctnnnnnnatagttcataggaccacacatcgctctt

SEQ ID NO: 825 - DNA, 60 bp, synthetic construct
  source 1..60: mol_type = other DNA
tcagacgtgtgctcttccgatctnnnnnnatagttgccaccattgatagtctctcctaac

SEQ ID NO: 826 - DNA, 58 bp, synthetic construct
  source 1..58: mol_type = other DNA
tcagacgtgtgctcttccgatctnnnnnnatagttagaccactgatggctttgtctat

SEQ ID NO: 827 - DNA, 57 bp, synthetic construct
  source 1..57: mol_type = other DNA
tcagacgtgtgctcttccgatctnnnnnnatagttcacacacgcaccatacacaaag

SEQ ID NO: 828 - DNA, 60 bp, synthetic construct
  source 1..60: mol_type = other DNA
tcagacgtgtgctcttccgatctnnnnnnatagtttcacctgtaaccgtctcaacataag

SEQ ID NO: 829 - DNA, 59 bp, synthetic construct
  source 1..59: mol_type = other DNA
tcagacgtgtgctcttccgatctnnnnnnatagttgtcatggagcccaatccatacata

SEQ ID NO: 830 - DNA, 59 bp, synthetic construct
  source 1..59: mol_type = other DNA
tcagacgtgtgctcttccgatctnnnnnnatagttcagggactctgtgaaaggtgtatc

SEQ ID NO: 831 - DNA, 60 bp, synthetic construct
  source 1..60: mol_type = other DNA
tcagacgtgtgctcttccgatctnnnnnnatagttcagaataccgtgtgtgggttaaatg

SEQ ID NO: 832 - DNA, 57 bp, synthetic construct
  source 1..57: mol_type = other DNA
tcagacgtgtgctcttccgatctnnnnnnatagttttcaaccacactcttggtcctc

SEQ ID NO: 833 - DNA, 58 bp, synthetic construct
  source 1..58: mol_type = other DNA
tcagacgtgtgctcttccgatctnnnnnnatagttgtgtccgtcctgtgtttgtagat

SEQ ID NO: 834 - DNA, 57 bp, synthetic construct
  source 1..57: mol_type = other DNA
tcagacgtgtgctcttccgatctnnnnnnatagttctccctcctctgccatgtttag

SEQ ID NO: 835 - DNA, 59 bp, synthetic construct
  source 1..59: mol_type = other DNA
tcagacgtgtgctcttccgatctnnnnnnatagttggaggtaggcacaacttcatacac

SEQ ID NO: 836 - DNA, 58 bp, synthetic construct
  source 1..58: mol_type = other DNA
tcagacgtgtgctcttccgatctnnnnnnatagttatcgattgtacaccggagtgatg

SEQ ID NO: 837 - DNA, 59 bp, synthetic construct
  source 1..59: mol_type = other DNA
tcagacgtgtgctcttccgatctnnnnnnatagttctctgtgtgttgaggtcactgtat

SEQ ID NO: 838 - DNA, 60 bp, synthetic construct
  source 1..60: mol_type = other DNA
tcagacgtgtgctcttccgatctnnnnnnatagttgatatggccttgaagaggagagaag

SEQ ID NO: 839 - DNA, 58 bp, synthetic construct
  source 1..58: mol_type = other DNA
tcagacgtgtgctcttccgatctnnnnnnatagtttagccatccttgagggaaatgag

SEQ ID NO: 840 - DNA, 57 bp, synthetic construct
  source 1..57: mol_type = other DNA
tcagacgtgtgctcttccgatctnnnnnnatagtttgggttgactgcagggatattg

SEQ ID NO: 841 - DNA, 59 bp, synthetic construct
  source 1..59: mol_type = other DNA
tcagacgtgtgctcttccgatctnnnnnnatagttccctacctctaatccctccagtaa

SEQ ID NO: 842 - DNA, 60 bp, synthetic construct
  source 1..60: mol_type = other DNA
tcagacgtgtgctcttccgatctnnnnnnatagttgctgggagatccaatagggaattag

SEQ ID NO: 843 - DNA, 59 bp, synthetic construct
  source 1..59: mol_type = other DNA
tcagacgtgtgctcttccgatctnnnnnnatagttctggtttgtttctaggtgcctttc

SEQ ID NO: 844 - DNA, 57 bp, synthetic construct
  source 1..57: mol_type = other DNA
tcagacgtgtgctcttccgatctnnnnnnatagttgcactgcagacacagggtataa

SEQ ID NO: 845 - DNA, 60 bp, synthetic construct
  source 1..60: mol_type = other DNA
tcagacgtgtgctcttccgatctnnnnnnatagttcaagcaggtgagattgttggtattt

SEQ ID NO: 846 - DNA, 58 bp, synthetic construct
  source 1..58: mol_type = other DNA
tcagacgtgtgctcttccgatctnnnnnnatagtttccattgaacgacacacccataa

SEQ ID NO: 847 - DNA, 60 bp, synthetic construct
  source 1..60: mol_type = other DNA
tcagacgtgtgctcttccgatctnnnnnnatagttcagtgaggaagagacggtagtttag

SEQ ID NO: 848 - DNA, 59 bp, synthetic construct
  source 1..59: mol_type = other DNA
tcagacgtgtgctcttccgatctnnnnnnatagttcgttccaaccaacagtacacaaag

SEQ ID NO: 849 - DNA, 56 bp, synthetic construct
  source 1..56: mol_type = other DNA
tcagacgtgtgctcttccgatctnnnnnnatagttagtgggttcctggaggtaaga

SEQ ID NO: 850 - DNA, 59 bp, synthetic construct
  source 1..59: mol_type = other DNA
tcagacgtgtgctcttccgatctnnnnnnatagttgtctctcatccagaagcacgttag

SEQ ID NO: 851 - DNA, 57 bp, synthetic construct
  source 1..57: mol_type = other DNA
tcagacgtgtgctcttccgatctnnnnnnatagttgtggatgtcacggaaccagtaa

SEQ ID NO: 852 - DNA, 59 bp, synthetic construct
  source 1..59: mol_type = other DNA
tcagacgtgtgctcttccgatctnnnnnnatagttgtggagccttctcatcctctttag

SEQ ID NO: 853 - DNA, 59 bp, synthetic construct
  source 1..59: mol_type = other DNA
tcagacgtgtgctcttccgatctnnnnnnatagttaaggctctaggagggaacctataa

SEQ ID NO: 854 - DNA, 61 bp, synthetic construct
  source 1..61: mol_type = other DNA
tcagacgtgtgctcttccgatctnnnnnnatagtttgagaagatttgggaggatggtattt

SEQ ID NO: 855 - DNA, 56 bp, synthetic construct
  source 1..56: mol_type = other DNA
tcagacgtgtgctcttccgatctnnnnnnatagttgccaggacacagtctgcataa

SEQ ID NO: 856 - DNA, 57 bp, synthetic construct
  source 1..57: mol_type = other DNA
tcagacgtgtgctcttccgatctnnnnnnatagtttgccatccatccagaactcttc

SEQ ID NO: 857 - DNA, 60 bp, synthetic construct
  source 1..60: mol_type = other DNA
tcagacgtgtgctcttccgatctnnnnnnatagttagggctagaacccatcagagtatag

SEQ ID NO: 858 - DNA, 59 bp, synthetic construct
  source 1..59: mol_type = other DNA
tcagacgtgtgctcttccgatctnnnnnnatagttgcctgtaaggtcacactccttatc

SEQ ID NO: 859 - DNA, 59 bp, synthetic construct
  source 1..59: mol_type = other DNA
tcagacgtgtgctcttccgatctnnnnnnatagttcagggtggaactgtataggaagac

SEQ ID NO: 860 - DNA, 59 bp, synthetic construct
  source 1..59: mol_type = other DNA
tcagacgtgtgctcttccgatctnnnnnnatagtttagagggagacatagggcagatag

SEQ ID NO: 861 - DNA, 59 bp, synthetic construct
  source 1..59: mol_type = other DNA
tcagacgtgtgctcttccgatctnnnnnnatagttctccagaggagcaagaaggtttat

SEQ ID NO: 862 - DNA, 60 bp, synthetic construct
  source 1..60: mol_type = other DNA
tcagacgtgtgctcttccgatctnnnnnnatagttgcctgtagtgcataagagtccataa

SEQ ID NO: 863 - DNA, 59 bp, synthetic construct
  source 1..59: mol_type = other DNA
tcagacgtgtgctcttccgatctnnnnnnatagttacagccatgtatcagcttcctatc

SEQ ID NO: 864 - DNA, 60 bp, synthetic construct
  source 1..60: mol_type = other DNA
tcagacgtgtgctcttccgatctnnnnnnatagttgacagaccaggattccacagaatag

SEQ ID NO: 865 - DNA, 59 bp, synthetic construct
  source 1..59: mol_type = other DNA
tcagacgtgtgctcttccgatctnnnnnnatagttccttcctgtgtgtgtatgcaaatg

SEQ ID NO: 866 - DNA, 59 bp, synthetic construct
  source 1..59: mol_type = other DNA
tcagacgtgtgctcttccgatctnnnnnnatagttggctatgggcacagagatagaaag

SEQ ID NO: 867 - DNA, 59 bp, synthetic construct
  source 1..59: mol_type = other DNA
tcagacgtgtgctcttccgatctnnnnnnatagttcaggaggatggagttgttgtagag

SEQ ID NO: 868 - DNA, 57 bp, synthetic construct
  source 1..57: mol_type = other DNA
tcagacgtgtgctcttccgatctnnnnnnatagttaggcatacatggtcacccatac

SEQ ID NO: 869 - DNA, 56 bp, synthetic construct
  source 1..56: mol_type = other DNA
tcagacgtgtgctcttccgatctnnnnnnatagttactcctggttctgctgcttac

SEQ ID NO: 870 - DNA, 56 bp, synthetic construct
  source 1..56: mol_type = other DNA
tcagacgtgtgctcttccgatctnnnnnnatagttcgtcctcatcgtcattgctct

SEQ ID NO: 871 - DNA, 59 bp, synthetic construct
  source 1..59: mol_type = other DNA
tcagacgtgtgctcttccgatctnnnnnnatagttgacaaactcttgggtggttgattg

SEQ ID NO: 872 - DNA, 57 bp, synthetic construct
  source 1..57: mol_type = other DNA
tcagacgtgtgctcttccgatctnnnnnnatagtttaggaagctgctgagccaatac

SEQ ID NO: 873 - DNA, 57 bp, synthetic construct
  source 1..57: mol_type = other DNA
tcagacgtgtgctcttccgatctnnnnnnatagttcactgctccaacctcctgtatt

SEQ ID NO: 874 - DNA, 57 bp, synthetic construct
  source 1..57: mol_type = other DNA
tcagacgtgtgctcttccgatctnnnnnnatagttccaaggaaggccagagcaaata

SEQ ID NO: 875 - DNA, 55 bp, synthetic construct
  source 1..55: mol_type = other DNA
tcagacgtgtgctcttccgatctnnnnnnatagtttgggacacaagccacatctt

SEQ ID NO: 876 - DNA, 58 bp, synthetic construct
  source 1..58: mol_type = other DNA
tcagacgtgtgctcttccgatctnnnnnnatagttccttgggaagatggtggttaagt

SEQ ID NO: 877 - DNA, 59 bp, synthetic construct
  source 1..59: mol_type = other DNA
tcagacgtgtgctcttccgatctnnnnnnatagttggacaagagtcagaaactgggtag

SEQ ID NO: 878 - DNA, 61 bp, synthetic construct
  source 1..61: mol_type = other DNA
tcagacgtgtgctcttccgatctnnnnnnatagttgggtcagaatcaagaaaccctctatc

SEQ ID NO: 879 - DNA, 59 bp, synthetic construct
  source 1..59: mol_type = other DNA
tcagacgtgtgctcttccgatctnnnnnnatagttcaacaaccctgcgaatgaactatg

SEQ ID NO: 880 - DNA, 57 bp, synthetic construct
  source 1..57: mol_type = other DNA
tcagacgtgtgctcttccgatctnnnnnnatagttgcgggaatcagagccaaataga

SEQ ID NO: 881 - DNA, 61 bp, synthetic construct
  source 1..61: mol_type = other DNA
tcagacgtgtgctcttccgatctnnnnnnatagtttgagacgtcttatccaagtggtttat

SEQ ID NO: 882 - DNA, 59 bp, synthetic construct
  source 1..59: mol_type = other DNA
tcagacgtgtgctcttccgatctnnnnnnatagttgacatgaggtctccagagctttac

SEQ ID NO: 883 - DNA, 57 bp, synthetic construct
  source 1..57: mol_type = other DNA
tcagacgtgtgctcttccgatctnnnnnnatagtttcacactggtcactcctacaga

SEQ ID NO: 884 - DNA, 57 bp, synthetic construct
  source 1..57: mol_type = other DNA
tcagacgtgtgctcttccgatctnnnnnnatagttcgctgtacaaggccaggtaata

SEQ ID NO: 885 - DNA, 57 bp, synthetic construct
  source 1..57: mol_type = other DNA
tcagacgtgtgctcttccgatctnnnnnnatagttaagctggtggtgttgggataag

SEQ ID NO: 886 - DNA, 59 bp, synthetic construct
  source 1..59: mol_type = other DNA
tcagacgtgtgctcttccgatctnnnnnnatagttgtctgcgtcagaaagacctcatag

SEQ ID NO: 887 - DNA, 60 bp, synthetic construct
  source 1..60: mol_type = other DNA
tcagacgtgtgctcttccgatctnnnnnnatagttccagtgaccctgatacctgaataac

SEQ ID NO: 888 - DNA, 63 bp, synthetic construct
  source 1..63: mol_type = other DNA
tcagacgtgtgctcttccgatctnnnnnnatagttgactacttcacttatctatctccaacca

SEQ ID NO: 889 - DNA, 59 bp, synthetic construct
  source 1..59: mol_type = other DNA
tcagacgtgtgctcttccgatctnnnnnnatagtttagaaaggccggtccatgttatac

SEQ ID NO: 890 - DNA, 58 bp, synthetic construct
  source 1..58: mol_type = other DNA
tcagacgtgtgctcttccgatctnnnnnnatagttccctcacagtagttcccgtagta

SEQ ID NO: 891 - DNA, 59 bp, synthetic construct
  source 1..59: mol_type = other DNA
tcagacgtgtgctcttccgatctnnnnnnatagttcagacgtgtcaaagccagataaac

SEQ ID NO: 892 - DNA, 59 bp, synthetic construct
  source 1..59: mol_type = other DNA
tcagacgtgtgctcttccgatctnnnnnnatagttggtctctgctggtaacctcaatac

SEQ ID NO: 893 - DNA, 59 bp, synthetic construct
  source 1..59: mol_type = other DNA
tcagacgtgtgctcttccgatctnnnnnnatagttggatcagtacgtgttcttggatga

SEQ ID NO: 894 - DNA, 57 bp, synthetic construct
  source 1..57: mol_type = other DNA
tcagacgtgtgctcttccgatctnnnnnnatagttaggaagtggctgagggtaaatg

SEQ ID NO: 895 - DNA, 58 bp, synthetic construct
  source 1..58: mol_type = other DNA
tcagacgtgtgctcttccgatctnnnnnnatagttcagagtggcctgctaggaaatta

SEQ ID NO: 896 - DNA, 58 bp, synthetic construct
  source 1..58: mol_type = other DNA
tcagacgtgtgctcttccgatctnnnnnnatagtttagatgccaaagatgcccttaca

SEQ ID NO: 897 - DNA, 59 bp, synthetic construct
  source 1..59: mol_type = other DNA
tcagacgtgtgctcttccgatctnnnnnnatagttctttagggacttcgttcctgtgag

SEQ ID NO: 898 - DNA, 57 bp, synthetic construct
  source 1..57: mol_type = other DNA
tcagacgtgtgctcttccgatctnnnnnnatagttaatggagaagtcagggccaatc

SEQ ID NO: 899 - DNA, 59 bp, synthetic construct
  source 1..59: mol_type = other DNA
tcagacgtgtgctcttccgatctnnnnnnatagttagtccagatcacatccagagagta

SEQ ID NO: 900 - DNA, 59 bp, synthetic construct
  source 1..59: mol_type = other DNA
tcagacgtgtgctcttccgatctnnnnnnatagttggtgtgacctttgtctctgtctta

SEQ ID NO: 901 - DNA, 58 bp, synthetic construct
  source 1..58: mol_type = other DNA
tcagacgtgtgctcttccgatctnnnnnnatagttccaaggacaaccaatccctactc

SEQ ID NO: 902 - DNA, 57 bp, synthetic construct
  source 1..57: mol_type = other DNA
tcagacgtgtgctcttccgatctnnnnnnatagttcccaggtgagctgtagcattta

SEQ ID NO: 903 - DNA, 58 bp, synthetic construct
  source 1..58: mol_type = other DNA
tcagacgtgtgctcttccgatctnnnnnnatagttgtcacagccagtcctcttacttc

SEQ ID NO: 904 - DNA, 58 bp, synthetic construct
  source 1..58: mol_type = other DNA
tcagacgtgtgctcttccgatctnnnnnnatagttgtgtgtgtgtgtgtgtgtgtaag

SEQ ID NO: 905 - DNA, 59 bp, synthetic construct
  source 1..59: mol_type = other DNA
tcagacgtgtgctcttccgatctnnnnnnatagttggaaaggtcagtggagttagatgg

SEQ ID NO: 906 - DNA, 57 bp, synthetic construct
  source 1..57: mol_type = other DNA
tcagacgtgtgctcttccgatctnnnnnnatagtttggcaaaggccacagtctataa

SEQ ID NO: 907 - DNA, 59 bp, synthetic construct
  source 1..59: mol_type = other DNA
tcagacgtgtgctcttccgatctnnnnnnatagttgcagaagacatcccgttctcaata

SEQ ID NO: 908 - DNA, 57 bp, synthetic construct
  source 1..57: mol_type = other DNA
tcagacgtgtgctcttccgatctnnnnnnatagttcagtcggttcagctacgcttta

SEQ ID NO: 909 - DNA, 57 bp, synthetic construct
  source 1..57: mol_type = other DNA
tcagacgtgtgctcttccgatctnnnnnnatagttcaacccagtagttgctcctctt

SEQ ID NO: 910 - DNA, 59 bp, synthetic construct
  source 1..59: mol_type = other DNA
tcagacgtgtgctcttccgatctnnnnnnatagttgggcatcagaaccctacagataaa

SEQ ID NO: 911 - DNA, 59 bp, synthetic construct
  source 1..59: mol_type = other DNA
tcagacgtgtgctcttccgatctnnnnnnatagttgcacactgaccattgagaagtaga

SEQ ID NO: 912 - DNA, 60 bp, synthetic construct
  source 1..60: mol_type = other DNA
tcagacgtgtgctcttccgatctnnnnnnatagttgactttctgagctagagggcttatt

SEQ ID NO: 913 - DNA, 55 bp, synthetic construct
  source 1..55: mol_type = other DNA
tcagacgtgtgctcttccgatctnnnnnnatagttcgcattggcaaggtgattgt

SEQ ID NO: 914 - DNA, 61 bp, synthetic construct
  source 1..61: mol_type = other DNA
tcagacgtgtgctcttccgatctnnnnnnatagttgaagggtcactcaggataaaggtatg

SEQ ID NO: 915 - DNA, 58 bp, synthetic construct
  source 1..58: mol_type = other DNA
tcagacgtgtgctcttccgatctnnnnnnatagttgtcagtcatggatctggctttct

SEQ ID NO: 916 - DNA, 57 bp, synthetic construct
  source 1..57: mol_type = other DNA
tcagacgtgtgctcttccgatctnnnnnnatagttccctcatgcggtagtggttaat

SEQ ID NO: 917 - DNA, 58 bp, synthetic construct
  source 1..58: mol_type = other DNA
tcagacgtgtgctcttccgatctnnnnnnatagttgttcccagaaccctggtcttaaa

SEQ ID NO: 918 - DNA, 59 bp, synthetic construct
  source 1..59: mol_type = other DNA
tcagacgtgtgctcttccgatctnnnnnnatagttctcagatccttggttcctgtgatt

SEQ ID NO: 919 - DNA, 59 bp, synthetic construct
  source 1..59: mol_type = other DNA
tcagacgtgtgctcttccgatctnnnnnnatagttcctcctcccatgcattctgattat

SEQ ID NO: 920 - DNA, 58 bp, synthetic construct
  source 1..58: mol_type = other DNA
tcagacgtgtgctcttccgatctnnnnnnatagttcaccggaagccaaacacaatatc

SEQ ID NO: 921 - DNA, 59 bp, synthetic construct
  source 1..59: mol_type = other DNA
tcagacgtgtgctcttccgatctnnnnnnatagttctgacatagcagaacaggaggatg

SEQ ID NO: 922 - DNA, 57 bp, synthetic construct
  source 1..57: mol_type = other DNA
tcagacgtgtgctcttccgatctnnnnnnatagttctgttggtcccacgtcttactt

SEQ ID NO: 923 - DNA, 60 bp, synthetic construct
  source 1..60: mol_type = other DNA
tcagacgtgtgctcttccgatctnnnnnnatagttgtcacctccatgagacaaagtaagg

SEQ ID NO: 924 - DNA, 59 bp, synthetic construct
  source 1..59: mol_type = other DNA
tcagacgtgtgctcttccgatctnnnnnnatagttccagggcaaggaaatagacgatag

SEQ ID NO: 925 - DNA, 57 bp, synthetic construct
  source 1..57: mol_type = other DNA
tcagacgtgtgctcttccgatctnnnnnnatagttctttcccggcctcactcatatt

SEQ ID NO: 926 - DNA, 58 bp, synthetic construct
  source 1..58: mol_type = other DNA
tcagacgtgtgctcttccgatctnnnnnnatagttgtatctggaaaggcctggtttct

SEQ ID NO: 927 - DNA, 59 bp, synthetic construct
  source 1..59: mol_type = other DNA
tcagacgtgtgctcttccgatctnnnnnnatagtttgaggatgttccctgttctctttc

SEQ ID NO: 928 - DNA, 58 bp, synthetic construct
  source 1..58: mol_type = other DNA
tcagacgtgtgctcttccgatctnnnnnnatagtttcatgagcagcaaccaggaatag

SEQ ID NO: 929 - DNA, 60 bp, synthetic construct
  source 1..60: mol_type = other DNA
tcagacgtgtgctcttccgatctnnnnnnatagttgctgggatctaggtacttgctaaag

SEQ ID NO: 930 - DNA, 57 bp, synthetic construct
  source 1..57: mol_type = other DNA
tcagacgtgtgctcttccgatctnnnnnnatagttcccaggtcttccagctcaataa

SEQ ID NO: 931 - DNA, 58 bp, synthetic construct
  source 1..58: mol_type = other DNA
tcagacgtgtgctcttccgatctnnnnnnatagttggtctaaggcaaacgagctagag

SEQ ID NO: 932 - DNA, 59 bp, synthetic construct
  source 1..59: mol_type = other DNA
tcagacgtgtgctcttccgatctnnnnnnatagttctgactgctaagactgtggaagag

SEQ ID NO: 933 - DNA, 57 bp, synthetic construct
  source 1..57: mol_type = other DNA
tcagacgtgtgctcttccgatctnnnnnnatagttcattggtgtgggtgatgctttc

SEQ ID NO: 934 - DNA, 57 bp, synthetic construct
  source 1..57: mol_type = other DNA
tcagacgtgtgctcttccgatctnnnnnnatagttcacccagtgactccacgtattc

SEQ ID NO: 935 - DNA, 59 bp, synthetic construct
  source 1..59: mol_type = other DNA
tcagacgtgtgctcttccgatctnnnnnnatagttctgctgtagaggttgacagtgtag

SEQ ID NO: 936 - DNA, 57 bp, synthetic construct
  source 1..57: mol_type = other DNA
tcagacgtgtgctcttccgatctnnnnnnatagttcgcattctctgcagcttgattt

SEQ ID NO: 937 - DNA, 58 bp, synthetic construct
  source 1..58: mol_type = other DNA
tcagacgtgtgctcttccgatctnnnnnnatagttcactgtgtagacctgggaagaac

SEQ ID NO: 938 - DNA, 56 bp, synthetic construct
  source 1..56: mol_type = other DNA
tcagacgtgtgctcttccgatctnnnnnnatagttcagggcttgagacaccttctt

SEQ ID NO: 939 - DNA, 59 bp, synthetic construct
  source 1..59: mol_type = other DNA
tcagacgtgtgctcttccgatctnnnnnnatagttgtccacatttcctaagccacattc

SEQ ID NO: 940 - DNA, 57 bp, synthetic construct
  source 1..57: mol_type = other DNA
tcagacgtgtgctcttccgatctnnnnnnatagtttccagagcctggcagattaaag

SEQ ID NO: 941 - DNA, 59 bp, synthetic construct
  source 1..59: mol_type = other DNA
tcagacgtgtgctcttccgatctnnnnnnatagttcaagccaaacctctttcggtattc

SEQ ID NO: 942 - DNA, 58 bp, synthetic construct
  source 1..58: mol_type = other DNA
tcagacgtgtgctcttccgatctnnnnnnatagttcaccctgttcttagcctgtatgt

SEQ ID NO: 943 - DNA, 58 bp, synthetic construct
  source 1..58: mol_type = other DNA
tcagacgtgtgctcttccgatctnnnnnnatagttctgcccagaactgacttccttta

SEQ ID NO: 944 - DNA, 57 bp, synthetic construct
  source 1..57: mol_type = other DNA
tcagacgtgtgctcttccgatctnnnnnnatagttgttgctccacacccaggtatta

SEQ ID NO: 945 - DNA, 59 bp, synthetic construct
  source 1..59: mol_type = other DNA
tcagacgtgtgctcttccgatctnnnnnnatagttcactgtggtaaggagtcgttgtta

SEQ ID NO: 946 - DNA, 59 bp, synthetic construct
  source 1..59: mol_type = other DNA
tcagacgtgtgctcttccgatctnnnnnnatagttggagaaggaaagagaaggcgtaaa

SEQ ID NO: 947 - DNA, 59 bp, synthetic construct
  source 1..59: mol_type = other DNA
tcagacgtgtgctcttccgatctnnnnnnatagttctgatggatctgctgtgaggttag

SEQ ID NO: 948 - DNA, 60 bp, synthetic construct
  source 1..60: mol_type = other DNA
tcagacgtgtgctcttccgatctnnnnnnatagttgggtccttcgcctgtataagataac

SEQ ID NO: 949 - DNA, 58 bp, synthetic construct
  source 1..58: mol_type = other DNA
tcagacgtgtgctcttccgatctnnnnnnatagttccggaactttaagccaacaaagg

SEQ ID NO: 950 - DNA, 58 bp, synthetic construct
  source 1..58: mol_type = other DNA
tcagacgtgtgctcttccgatctnnnnnnatagttatctcccacgtcaatctttcctc

SEQ ID NO: 951 - DNA, 58 bp, synthetic construct
  source 1..58: mol_type = other DNA
tcagacgtgtgctcttccgatctnnnnnnatagttcttctgaggttcgtgggatgatt

SEQ ID NO: 952 - DNA, 59 bp, synthetic construct
  source 1..59: mol_type = other DNA
tcagacgtgtgctcttccgatctnnnnnnatagttccagtggaaggagtgaatgtagag

SEQ ID NO: 953 - DNA, 57 bp, synthetic construct
  source 1..57: mol_type = other DNA
tcagacgtgtgctcttccgatctnnnnnnatagttggtatcccagtgcaggctaata

SEQ ID NO: 954 - DNA, 56 bp, synthetic construct
  source 1..56: mol_type = other DNA
tcagacgtgtgctcttccgatctnnnnnnatagttcgagcagggtcgtaggaaatc

SEQ ID NO: 955 - DNA, 57 bp, synthetic construct
  source 1..57: mol_type = other DNA
tcagacgtgtgctcttccgatctnnnnnnatagttgtgctatttgcctctccctctt

SEQ ID NO: 956 - DNA, 59 bp, synthetic construct
  source 1..59: mol_type = other DNA
tcagacgtgtgctcttccgatctnnnnnnatagttcttccttccttccttccttccttc

SEQ ID NO: 957 - DNA, 59 bp, synthetic construct
  source 1..59: mol_type = other DNA
tcagacgtgtgctcttccgatctnnnnnnatagttgtttctcctcggagactggtaatg

SEQ ID NO: 958 - DNA, 58 bp, synthetic construct
  source 1..58: mol_type = other DNA
tcagacgtgtgctcttccgatctnnnnnnatagttatctgcctgaagaccagaagatg

SEQ ID NO: 959 - DNA, 58 bp, synthetic construct
  source 1..58: mol_type = other DNA
tcagacgtgtgctcttccgatctnnnnnnatagttctggttaacaccgtccctgtatc

SEQ ID NO: 960 - DNA, 58 bp, synthetic construct
  source 1..58: mol_type = other DNA
tcagacgtgtgctcttccgatctnnnnnnatagttccaacacctctggagccatatac

SEQ ID NO: 961 - DNA, 59 bp, synthetic construct
  source 1..59: mol_type = other DNA
tcagacgtgtgctcttccgatctnnnnnnatagttacagaccaacaccaaagcataaac

SEQ ID NO: 962 - DNA, 59 bp, synthetic construct
  source 1..59: mol_type = other DNA
tcagacgtgtgctcttccgatctnnnnnnatagttcgactcccatcaatcaccactatc

SEQ ID NO: 963 - DNA, 59 bp, synthetic construct
  source 1..59: mol_type = other DNA
tcagacgtgtgctcttccgatctnnnnnnatagttctgtactctctccatcctccttct

SEQ ID NO: 964 - DNA, 57 bp, synthetic construct
  source 1..57: mol_type = other DNA
tcagacgtgtgctcttccgatctnnnnnnatagttaactggaggtatcagggctttg

SEQ ID NO: 965 - DNA, 58 bp, synthetic construct
  source 1..58: mol_type = other DNA
tcagacgtgtgctcttccgatctnnnnnnatagttagggatctgcgaggtttcattag

SEQ ID NO: 966 - DNA, 59 bp, synthetic construct
  source 1..59: mol_type = other DNA
tcagacgtgtgctcttccgatctnnnnnnatagttctccacctgatccacctctatttc

SEQ ID NO: 967 - DNA, 58 bp, synthetic construct
  source 1..58: mol_type = other DNA
tcagacgtgtgctcttccgatctnnnnnnatagttggatgagaggacgaagggtattg

SEQ ID NO: 968 - DNA, 59 bp, synthetic construct
  source 1..59: mol_type = other DNA
tcagacgtgtgctcttccgatctnnnnnnatagtttctcttgctgactctcttgtagac

SEQ ID NO: 969 - DNA, 59 bp, synthetic construct
  source 1..59: mol_type = other DNA
tcagacgtgtgctcttccgatctnnnnnnatagttgcataaggctctgggttctatctc

SEQ ID NO: 970 - DNA, 57 bp, synthetic construct
  source 1..57: mol_type = other DNA
tcagacgtgtgctcttccgatctnnnnnnatagttgttgttgctgatggcctgattg

SEQ ID NO: 971 - DNA, 59 bp, synthetic construct
  source 1..59: mol_type = other DNA
tcagacgtgtgctcttccgatctnnnnnnatagttcacccgcacttcatgttctttatc

SEQ ID NO: 972 - DNA, 59 bp, synthetic construct
  source 1..59: mol_type = other DNA
tcagacgtgtgctcttccgatctnnnnnnatagttgcttggagtaccatccagatagag

SEQ ID NO: 973 - DNA, 58 bp, synthetic construct
  source 1..58: mol_type = other DNA
tcagacgtgtgctcttccgatctnnnnnnatagttgggtcatggtgaagagcataaga

SEQ ID NO: 974 - DNA, 57 bp, synthetic construct
  source 1..57: mol_type = other DNA
tcagacgtgtgctcttccgatctnnnnnnatagttgctactccttgtggctgtcttt

SEQ ID NO: 975 - DNA, 59 bp, synthetic construct
  source 1..59: mol_type = other DNA
tcagacgtgtgctcttccgatctnnnnnnatagttctgtcacatggctgacctcttaat

SEQ ID NO: 976 - DNA, 58 bp, synthetic construct
  source 1..58: mol_type = other DNA
tcagacgtgtgctcttccgatctnnnnnnatagttcatacccgaggttccatgtttct

SEQ ID NO: 977 - DNA, 58 bp, synthetic construct
  source 1..58: mol_type = other DNA
tcagacgtgtgctcttccgatctnnnnnnatagttgggatggaaattgtgagggagat

SEQ ID NO: 978 - DNA, 58 bp, synthetic construct
  source 1..58: mol_type = other DNA
tcagacgtgtgctcttccgatctnnnnnnatagtttgactccacagcactcactttac

SEQ ID NO: 979 - DNA, 57 bp, synthetic construct
  source 1..57: mol_type = other DNA
tcagacgtgtgctcttccgatctnnnnnnatagttagccatccgactgcatctattt

SEQ ID NO: 980 - DNA, 58 bp, synthetic construct
  source 1..58: mol_type = other DNA
tcagacgtgtgctcttccgatctnnnnnnatagttaggaggctggaagaagagaaatg

SEQ ID NO: 981 - DNA, 59 bp, synthetic construct
  source 1..59: mol_type = other DNA
tcagacgtgtgctcttccgatctnnnnnnatagttgagactttgatgtccaccctatgt

SEQ ID NO: 982 - DNA, 58 bp, synthetic construct
  source 1..58: mol_type = other DNA
tcagacgtgtgctcttccgatctnnnnnnatagttcttgcctttgccgttctgtaaat

SEQ ID NO: 983 - DNA, 57 bp, synthetic construct
  source 1..57: mol_type = other DNA
tcagacgtgtgctcttccgatctnnnnnnatagtttcgctaccacgtgcactttatt

SEQ ID NO: 984 - DNA, 58 bp, synthetic construct
  source 1..58: mol_type = other DNA
tcagacgtgtgctcttccgatctnnnnnnatagttcagtcatgttctcccagaccttc

SEQ ID NO: 985 - DNA, 58 bp, synthetic construct
  source 1..58: mol_type = other DNA
tcagacgtgtgctcttccgatctnnnnnnatagttacaatctgggaacaagccatagt

SEQ ID NO: 986 - DNA, 61 bp, synthetic construct
  source 1..61: mol_type = other DNA
tcagacgtgtgctcttccgatctnnnnnnatagttccctagaactggagttagagaaggta

SEQ ID NO: 987 - DNA, 58 bp, synthetic construct
  source 1..58: mol_type = other DNA
tcagacgtgtgctcttccgatctnnnnnnatagttgtttgtgtctgtgtgtgtgtgtg

SEQ ID NO: 988 - DNA, 57 bp, synthetic construct
  source 1..57: mol_type = other DNA
tcagacgtgtgctcttccgatctnnnnnnatagttagggaaccagtagccacataac

SEQ ID NO: 989 - DNA, 61 bp, synthetic construct
  source 1..61: mol_type = other DNA
tcagacgtgtgctcttccgatctnnnnnnatagttcatcacagttgtcatccttccatttc

SEQ ID NO: 990 - DNA, 58 bp, synthetic construct
  source 1..58: mol_type = other DNA
tcagacgtgtgctcttccgatctnnnnnnatagttgttcgtgtgcctcgtgatatttg

SEQ ID NO: 991 - DNA, 60 bp, synthetic construct
  source 1..60: mol_type = other DNA
tcagacgtgtgctcttccgatctnnnnnnatagttccaggtgacatcgtttgagaaattg

SEQ ID NO: 992 - DNA, 59 bp, synthetic construct
  source 1..59: mol_type = other DNA
tcagacgtgtgctcttccgatctnnnnnnatagttgagagacacaggttgaggatgaag

SEQ ID NO: 993 - DNA, 57 bp, synthetic construct
  source 1..57: mol_type = other DNA
tcagacgtgtgctcttccgatctnnnnnnatagttcagggcagcctcagaacaaata

SEQ ID NO: 994 - DNA, 57 bp, synthetic construct
  source 1..57: mol_type = other DNA
tcagacgtgtgctcttccgatctnnnnnnatagttaaacaggttggaggtgacagag

SEQ ID NO: 995 - DNA, 56 bp, synthetic construct
  source 1..56: mol_type = other DNA
tcagacgtgtgctcttccgatctnnnnnnatagttggagccagcagcagtgtataa

SEQ ID NO: 996 - DNA, 57 bp, synthetic construct
  source 1..57: mol_type = other DNA
tcagacgtgtgctcttccgatctnnnnnnatagttgaagtccctgtgggcaatagaa

SEQ ID NO: 997 - DNA, 59 bp, synthetic construct
  source 1..59: mol_type = other DNA
tcagacgtgtgctcttccgatctnnnnnnatagttggaagctgaggttgagaggttaag

SEQ ID NO: 998 - DNA, 58 bp, synthetic construct
  source 1..58: mol_type = other DNA
tcagacgtgtgctcttccgatctnnnnnnatagttgggagtaacagcatccagaacaa

SEQ ID NO: 999 - DNA, 59 bp, synthetic construct
  source 1..59: mol_type = other DNA
tcagacgtgtgctcttccgatctnnnnnnatagttgagatgagagagacggtagggtat

SEQ ID NO: 1000 - DNA, 59 bp, synthetic construct
  source 1..59: mol_type = other DNA
tcagacgtgtgctcttccgatctnnnnnnatagttgtacacagtgatgctgtggaagta

SEQ ID NO: 1001 - DNA, 58 bp, synthetic construct
  source 1..58: mol_type = other DNA
tcagacgtgtgctcttccgatctnnnnnnatagttccacaagcagagaagagaggaaa

SEQ ID NO: 1002 - DNA, 59 bp, synthetic construct
  source 1..59: mol_type = other DNA
tcagacgtgtgctcttccgatctnnnnnnatagttggtccaactacagaggaacaagaa

SEQ ID NO: 1003 - DNA, 59 bp, synthetic construct
  source 1..59: mol_type = other DNA
tcagacgtgtgctcttccgatctnnnnnnatagttctcatggtcatcttgtcctctgtg

SEQ ID NO: 1004 - DNA, 59 bp, synthetic construct
  source 1..59: mol_type = other DNA
tcagacgtgtgctcttccgatctnnnnnnatagttagaggaaggcaagagtaaggtaga

SEQ ID NO: 1005 - DNA, 59 bp, synthetic construct
  source 1..59: mol_type = other DNA
tcagacgtgtgctcttccgatctnnnnnnatagttctctgctgctctaggcttcataat

SEQ ID NO: 1006 - DNA, 58 bp, synthetic construct
  source 1..58: mol_type = other DNA
tcagacgtgtgctcttccgatctnnnnnnatagttcaagctagtcagggtagcaagaa

SEQ ID NO: 1007 - DNA, 59 bp, synthetic construct
  source 1..59: mol_type = other DNA
tcagacgtgtgctcttccgatctnnnnnnatagttcagcctggtatcctcaccaataaa

SEQ ID NO: 1008 - DNA, 59 bp, synthetic construct
  source 1..59: mol_type = other DNA
tcagacgtgtgctcttccgatctnnnnnnatagttcatcctgatgaggaaagggtcttc

SEQ ID NO: 1009 - DNA, 59 bp, synthetic construct
  source 1..59: mol_type = other DNA
tcagacgtgtgctcttccgatctnnnnnnatagttacgttctcaagtcaagagctaaca

SEQ ID NO: 1010 - DNA, 58 bp, synthetic construct
  source 1..58: mol_type = other DNA
tcagacgtgtgctcttccgatctnnnnnnatagttcagggataaatgaggagcaaggt

SEQ ID NO: 1011 - DNA, 60 bp, synthetic construct
  source 1..60: mol_type = other DNA
tcagacgtgtgctcttccgatctnnnnnnatagttccgtccatgttagactgatctcttc

SEQ ID NO: 1012 - DNA, 57 bp, synthetic construct
  source 1..57: mol_type = other DNA
tcagacgtgtgctcttccgatctnnnnnnatagttcccaggaatccacgcactttat

SEQ ID NO: 1013 - DNA, 57 bp, synthetic construct
  source 1..57: mol_type = other DNA
tcagacgtgtgctcttccgatctnnnnnnatagttgacagaatgggctgcagtagaa

SEQ ID NO: 1014 - DNA, 60 bp, synthetic construct
  source 1..60: mol_type = other DNA
tcagacgtgtgctcttccgatctnnnnnnatagttcctacagtgagaaagagaccgaatg

SEQ ID NO: 1015 - DNA, 58 bp, synthetic construct
  source 1..58: mol_type = other DNA
tcagacgtgtgctcttccgatctnnnnnnatagttggctggccatcattcatgtttat

SEQ ID NO: 1016 - DNA, 61 bp, synthetic construct
  source 1..61: mol_type = other DNA
tcagacgtgtgctcttccgatctnnnnnnatagttctgcagagacacagactgacatatac

SEQ ID NO: 1017 - DNA, 58 bp, synthetic construct
  source 1..58: mol_type = other DNA
tcagacgtgtgctcttccgatctnnnnnnatagttagcaagttggttgaggaagagag

SEQ ID NO: 1018 - DNA, 59 bp, synthetic construct
  source 1..59: mol_type = other DNA
tcagacgtgtgctcttccgatctnnnnnnatagttaactctcttgtccacactcacatc

SEQ ID NO: 1019 - DNA, 59 bp, synthetic construct
  source 1..59: mol_type = other DNA
tcagacgtgtgctcttccgatctnnnnnnatagttgatgggttcctctcccagttaaag

SEQ ID NO: 1020 - DNA, 57 bp, synthetic construct
  source 1..57: mol_type = other DNA
tcagacgtgtgctcttccgatctnnnnnnatagttggagcaaggtgaggatgagaaa

SEQ ID NO: 1021 - DNA, 60 bp, synthetic construct
  source 1..60: mol_type = other DNA
tcagacgtgtgctcttccgatctnnnnnnatagttgacaaaggcagcacttctagagata

SEQ ID NO: 1022 - DNA, 57 bp, synthetic construct
  source 1..57: mol_type = other DNA
tcagacgtgtgctcttccgatctnnnnnnatagttccacagcatggtcctttgtttc

SEQ ID NO: 1023 - DNA, 58 bp, synthetic construct
  source 1..58: mol_type = other DNA
tcagacgtgtgctcttccgatctnnnnnnatagttttagagcccatcacccacaatac

SEQ ID NO: 1024 - DNA, 57 bp, synthetic construct
  source 1..57: mol_type = other DNA
tcagacgtgtgctcttccgatctnnnnnnatagttctttgggctcctgagtctgttt

SEQ ID NO: 1025 - DNA, 60 bp, synthetic construct
  source 1..60: mol_type = other DNA
tcagacgtgtgctcttccgatctnnnnnnatagttgctggcatcaaactcttcaacatag

SEQ ID NO: 1026 - DNA, 60 bp, synthetic construct; identical to SEQ ID NO: 1011
  source 1..60: mol_type = other DNA

SEQ ID NO: 1027 - DNA, 60 bp, synthetic construct
  source 1..60: mol_type = other DNA
tcagacgtgtgctcttccgatctnnnnnnatagttcctcagagctgatggttgtcatatc

SEQ ID NO: 1028 - DNA, 59 bp, synthetic construct
  source 1..59: mol_type = other DNA
tcagacgtgtgctcttccgatctnnnnnnatagttggtcatcttgttctctgtggtctc

SEQ ID NO: 1029 - DNA, 60 bp, synthetic construct; identical to SEQ ID NO: 1027
  source 1..60: mol_type = other DNA

SEQ ID NO: 1030 - DNA, 59 bp, synthetic construct
  source 1..59: mol_type = other DNA
tcagacgtgtgctcttccgatctnnnnnnatagttgtcacctgaaaccttggaggatag

SEQ ID NO: 1031 - DNA, 57 bp, synthetic construct
  source 1..57: mol_type = other DNA
tcagacgtgtgctcttccgatctnnnnnnatagttaatcgccttgatctctccactc

SEQ ID NO: 1032 - DNA, 59 bp, synthetic construct
  source 1..59: mol_type = other DNA
tcagacgtgtgctcttccgatctnnnnnnatagttcctataatccaccacctggaactg

SEQ ID NO: 1033 - DNA, 57 bp, synthetic construct
  source 1..57: mol_type = other DNA
tcagacgtgtgctcttccgatctnnnnnnatagttagcaggtggctcttcatcttac

SEQ ID NO: 1034 - DNA, 60 bp, synthetic construct
  source 1..60: mol_type = other DNA
tcagacgtgtgctcttccgatctnnnnnnatagttcgtactaactgagccttctgcttat

SEQ ID NO: 1035 - DNA, 61 bp, synthetic construct
  source 1..61: mol_type = other DNA
tcagacgtgtgctcttccgatctnnnnnnatagttgacttgaaagccctagagaggattag

SEQ ID NO: 1036 - DNA, 57 bp, synthetic construct
  source 1..57: mol_type = other DNA
tcagacgtgtgctcttccgatctnnnnnnatagttagaacggctcaggatgcataaa

SEQ ID NO: 1037 - DNA, 59 bp, synthetic construct
  source 1..59: mol_type = other DNA
tcagacgtgtgctcttccgatctnnnnnnatagttcgtctcaggacctttgtctctaac

SEQ ID NO: 1038 - DNA, 59 bp, synthetic construct
  source 1..59: mol_type = other DNA
tcagacgtgtgctcttccgatctnnnnnnatagttctcacactcactccttctcttcac

SEQ ID NO: 1039 - DNA, 59 bp, synthetic construct
  source 1..59: mol_type = other DNA
tcagacgtgtgctcttccgatctnnnnnnatagttggctcaggactcatttctcttctc

SEQ ID NO: 1040 - DNA, 59 bp, synthetic construct
  source 1..59: mol_type = other DNA
tcagacgtgtgctcttccgatctnnnnnnatagttcccatactgaaactcctcctcttc

SEQ ID NO: 1041 - DNA, 58 bp, synthetic construct
  source 1..58: mol_type = other DNA
tcagacgtgtgctcttccgatctnnnnnnatagttcctatgctcacaagggctgtatc

SEQ ID NO: 1042 - DNA, 60 bp, synthetic construct
  source 1..60: mol_type = other DNA
tcagacgtgtgctcttccgatctnnnnnnatagttccttggaggctagctttaggaatag

SEQ ID NO: 1043 - DNA, 60 bp, synthetic construct; identical to SEQ ID NO: 1042
  source 1..60: mol_type = other DNA

SEQ ID NO: 1044 - DNA, 60 bp, synthetic construct
  source 1..60: mol_type = other DNA
tcagacgtgtgctcttccgatctnnnnnnatagttgagtcaccagggaagaggaataaag

SEQ ID NO: 1045 - DNA, 60 bp, synthetic construct
  source 1..60: mol_type = other DNA
tcagacgtgtgctcttccgatctnnnnnnatagttctttcctttcctttcctctcctctc

SEQ ID NO: 1046 - DNA, 59 bp, synthetic construct
  source 1..59: mol_type = other DNA
tcagacgtgtgctcttccgatctnnnnnnatagttcagaccctaacctgacttgattgt

SEQ ID NO: 1047 - DNA, 59 bp, synthetic construct
  source 1..59: mol_type = other DNA
tcagacgtgtgctcttccgatctnnnnnnatagttgggtcaaccctacttgacgaaata

SEQ ID NO: 1048 - DNA, 58 bp, synthetic construct
  source 1..58: mol_type = other DNA
tcagacgtgtgctcttccgatctnnnnnnatagttctcaaccaaagagcaaccgaaag

SEQ ID NO: 1049 - DNA, 59 bp, synthetic construct
  source 1..59: mol_type = other DNA
tcagacgtgtgctcttccgatctnnnnnnatagttaatcacatccaaggagtggtactg

SEQ ID NO: 1050 - DNA, 59 bp, synthetic construct
  source 1..59: mol_type = other DNA
tcagacgtgtgctcttccgatctnnnnnnatagttgccgtatccattctcctgtgttat

SEQ ID NO: 1051 - DNA, 59 bp, synthetic construct
  source 1..59: mol_type = other DNA
tcagacgtgtgctcttccgatctnnnnnnatagttcccaatgtggaggaaggagaatag

SEQ ID NO: 1052 - DNA, 59 bp, synthetic construct; identical to SEQ ID NO: 1049
  source 1..59: mol_type = other DNA

SEQ ID NO: 1053 - DNA, 59 bp, synthetic construct
  source 1..59: mol_type = other DNA
tcagacgtgtgctcttccgatctnnnnnnatagttgcttcatcaggtagcactgatctt

SEQ ID NO: 1054 - DNA, 57 bp, synthetic construct
  source 1..57: mol_type = other DNA
tcagacgtgtgctcttccgatctnnnnnnatagttcctccctttggtgctgaagtaa

SEQ ID NO: 1055 - DNA, 59 bp, synthetic construct
  source 1..59: mol_type = other DNA
tcagacgtgtgctcttccgatctnnnnnnatagttcgggtctgaagaggacacaaatac

SEQ ID NO: 1056 - DNA, 62 bp, synthetic construct
  source 1..62: mol_type = other DNA
tcagacgtgtgctcttccgatctnnnnnnatagttcagaatgagtctaggagggttgtattc

SEQ ID NO: 1057 - DNA, 61 bp, synthetic construct
  source 1..61: mol_type = other DNA
tcagacgtgtgctcttccgatctnnnnnnatagttggagaccataggtgaagatggtttag

SEQ ID NO: 1058 - DNA, 60 bp, synthetic construct
  source 1..60: mol_type = other DNA
tcagacgtgtgctcttccgatctnnnnnnatagttgctgtgtttcttctctctcaggtaa

SEQ ID NO: 1059 - DNA, 59 bp, synthetic construct
  source 1..59: mol_type = other DNA
tcagacgtgtgctcttccgatctnnnnnnatagttcccatcccaaagctccacatataa

SEQ ID NO: 1060 - DNA, 58 bp, synthetic construct
  source 1..58: mol_type = other DNA
tcagacgtgtgctcttccgatctnnnnnnatagttgcagaatgagtctaggagggttg

SEQ ID NO: 1061 - DNA, 60 bp, synthetic construct
  source 1..60: mol_type = other DNA
tcagacgtgtgctcttccgatctnnnnnnatagttccttcccacaatcttcagttactct

SEQ ID NO: 1062 - DNA, 58 bp, synthetic construct
  source 1..58: mol_type = other DNA
tcagacgtgtgctcttccgatctnnnnnnatagttacagtgatgctgtggaagtatgt

SEQ ID NO: 1063 - DNA, 57 bp, synthetic construct
  source 1..57: mol_type = other DNA
tcagacgtgtgctcttccgatctnnnnnnatagttgggctgtgtttcttctctctca

SEQ ID NO: 1064 - DNA, 57 bp, synthetic construct
  source 1..57: mol_type = other DNA
tcagacgtgtgctcttccgatctnnnnnnatagttctggtggcatcaatccactttg

SEQ ID NO: 1065 - DNA, 59 bp, synthetic construct
  source 1..59: mol_type = other DNA
tcagacgtgtgctcttccgatctnnnnnnatagttcccagtgaccttaattccctcttt

SEQ ID NO: 1066 - DNA, 59 bp, synthetic construct
  source 1..59: mol_type = other DNA
tcagacgtgtgctcttccgatctnnnnnnatagtttctctccatctctgctttcctttg

SEQ ID NO: 1067 - DNA, 59 bp, synthetic construct
  source 1..59: mol_type = other DNA
tcagacgtgtgctcttccgatctnnnnnnatagttgagaagccagcagcactcttatag

SEQ ID NO: 1068 - DNA, 58 bp, synthetic construct; identical to SEQ ID NO: 998
  source 1..58: mol_type = other DNA

SEQ ID NO: 1069 - DNA, 58 bp, synthetic construct
  source 1..58: mol_type = other DNA
cctacacgacgctcttccgatctnnnnnnacatcacttggttcttccaaagcgagaag

SEQ ID NO: 1070 - DNA, 59 bp, synthetic construct
  source 1..59: mol_type = other DNA
cctacacgacgctcttccgatctnnnnnnacatcacctgtgtctggtctattgctagtg

SEQ ID NO: 1071 - DNA, 57 bp, synthetic construct
  source 1..57: mol_type = other DNA
cctacacgacgctcttccgatctnnnnnnacatcaggaggttgcagtgagttgagat

SEQ ID NO: 1072 - DNA, 61 bp, synthetic construct
  source 1..61: mol_type = other DNA
cctacacgacgctcttccgatctnnnnnnacatcacagttacacctaagccaccctattac

SEQ ID NO: 1073 - DNA, 60 bp, synthetic construct
  source 1..60: mol_type = other DNA
cctacacgacgctcttccgatctnnnnnnacatcacacggtctacagcatcgagtataag

SEQ ID NO: 1074 - DNA, 57 bp, synthetic construct
  source 1..57: mol_type = other DNA
cctacacgacgctcttccgatctnnnnnnacatcagactgaacgtcttgctcgagat

SEQ ID NO: 1075 - DNA, 60 bp, synthetic construct
  source 1..60: mol_type = other DNA
cctacacgacgctcttccgatctnnnnnnacatcagtggaaaggactcagtagaacagaa

SEQ ID NO: 1076 - DNA, 60 bp, synthetic construct
  source 1..60: mol_type = other DNA
cctacacgacgctcttccgatctnnnnnnacatcagacaactattcagccaatgtgatgg

SEQ ID NO: 1077 - DNA, 58 bp, synthetic construct
  source 1..58: mol_type = other DNA
cctacacgacgctcttccgatctnnnnnnacatcactcagtcaacaggaaggcatcaa

SEQ ID NO: 1078 - DNA, 58 bp, synthetic construct
  source 1..58: mol_type = other DNA
cctacacgacgctcttccgatctnnnnnnacatcagcattccttccacctccttgata

SEQ ID NO: 1079 - DNA, 59 bp, synthetic construct
  source 1..59: mol_type = other DNA
cctacacgacgctcttccgatctnnnnnnacatcacaggtcttggacttcattccattt

SEQ ID NO: 1080 - DNA, 55 bp, synthetic construct
  source 1..55: mol_type = other DNA
cctacacgacgctcttccgatctnnnnnnacatcaaccatcatgggctggacatt

SEQ ID NO: 1081 - DNA, 60 bp, synthetic construct
  source 1..60: mol_type = other DNA
cctacacgacgctcttccgatctnnnnnnacatcactgtaccaccatccactacaactac

SEQ ID NO: 1082 - DNA, 59 bp, synthetic construct
  source 1..59: mol_type = other DNA
cctacacgacgctcttccgatctnnnnnnacatcagagacgagcaggaagtcgattatg

SEQ ID NO: 1083 - DNA, 59 bp, synthetic construct
  source 1..59: mol_type = other DNA
cctacacgacgctcttccgatctnnnnnnacatcagccaggaacatacccttagaagaa

SEQ ID NO: 1084 - DNA, 57 bp, synthetic construct
  source 1..57: mol_type = other DNA
cctacacgacgctcttccgatctnnnnnnacatcactgcctccattctgaccatttc

SEQ ID NO: 1085 - DNA, 57 bp, synthetic construct
  source 1..57: mol_type = other DNA
cctacacgacgctcttccgatctnnnnnnacatcacagatgtgtgagccaggaacat

SEQ ID NO: 1086 - DNA, 58 bp, synthetic construct
  source 1..58: mol_type = other DNA
cctacacgacgctcttccgatctnnnnnnacatcaaggaggaagaagaggaagaggag

SEQ ID NO: 1087 - DNA, 58 bp, synthetic construct
  source 1..58: mol_type = other DNA
cctacacgacgctcttccgatctnnnnnnacatcagtccgccttcctatgtctcattt

SEQ ID NO: 1088 - DNA, 56 bp, synthetic construct
  source 1..56: mol_type = other DNA
cctacacgacgctcttccgatctnnnnnnacatcatgctggcagtggaactaagaa

SEQ ID NO: 1089 - DNA, 59 bp, synthetic construct
  source 1..59: mol_type = other DNA
cctacacgacgctcttccgatctnnnnnnacatcacttctgaaacctctgggtcatctc

SEQ ID NO: 1090 - DNA, 58 bp, synthetic construct
  source 1..58: mol_type = other DNA
cctacacgacgctcttccgatctnnnnnnacatcacaagatgaggtcacggacgatta

SEQ ID NO: 1091 - DNA, 60 bp, synthetic construct
  source 1..60: mol_type = other DNA
cctacacgacgctcttccgatctnnnnnnacatcatcgctgtatgaaggaagatggtaag

SEQ ID NO: 1092 - DNA, 57 bp, synthetic construct
  source 1..57: mol_type = other DNA
cctacacgacgctcttccgatctnnnnnnacatcaggtgcacaaacaggacacattc

SEQ ID NO: 1093 - DNA, 57 bp, synthetic construct
  source 1..57: mol_type = other DNA
cctacacgacgctcttccgatctnnnnnnacatcaaccgaaggtgacttccatcaag

SEQ ID NO: 1094 - DNA, 55 bp, synthetic construct
  source 1..55: mol_type = other DNA
cctacacgacgctcttccgatctnnnnnnacatcagtacaagcacgtggcgagtc

SEQ ID NO: 1095 - DNA, 60 bp, synthetic construct
  source 1..60: mol_type = other DNA
cctacacgacgctcttccgatctnnnnnnacatcacaactttgactgctgtcttggatac

SEQ ID NO: 1096 - DNA, 57 bp, synthetic construct
  source 1..57: mol_type = other DNA
cctacacgacgctcttccgatctnnnnnnacatcagcgaagacctggagaaacagaa

SEQ ID NO: 1097 - DNA, 57 bp, synthetic construct
  source 1..57: mol_type = other DNA
cctacacgacgctcttccgatctnnnnnnacatcatcaggcagagggtgatagaaga

SEQ ID NO: 1098 - DNA, 57 bp, synthetic construct
  source 1..57: mol_type = other DNA
cctacacgacgctcttccgatctnnnnnnacatcacttgagaaggcacaccgtaaga

SEQ ID NO: 1099 - DNA, 59 bp, synthetic construct
  source 1..59: mol_type = other DNA
cctacacgacgctcttccgatctnnnnnnacatcaatggtaaacgctgtccctagtaaa

SEQ ID NO: 1100 - DNA, 59 bp, synthetic construct
  source 1..59: mol_type = other DNA
cctacacgacgctcttccgatctnnnnnnacatcacactgctgctgagatgaatgaaac

SEQ ID NO: 1101 - DNA, 61 bp, synthetic construct
  source 1..61: mol_type = other DNA
cctacacgacgctcttccgatctnnnnnnacatcacccagcacttgaaatggaaagataaa

SEQ ID NO: 1102 - DNA, 58 bp, synthetic construct
  source 1..58: mol_type = other DNA
cctacacgacgctcttccgatctnnnnnnacatcacttcctggagcagcagaataaga

SEQ ID NO: 1103 - DNA, 58 bp, synthetic construct
  source 1..58: mol_type = other DNA
cctacacgacgctcttccgatctnnnnnnacatcaaaggatatggtagttgggcaagg

SEQ ID NO: 1104 - DNA, 56 bp, synthetic construct
  source 1..56: mol_type = other DNA
cctacacgacgctcttccgatctnnnnnnacatcaatatccactcctgctctccct

SEQ ID NO: 1105 - DNA, 57 bp, synthetic construct
  source 1..57: mol_type = other DNA
cctacacgacgctcttccgatctnnnnnnacatcatatgtgaccactggccctaaac

SEQ ID NO: 1106 - DNA, 57 bp, synthetic construct
  source 1..57: mol_type = other DNA
cctacacgacgctcttccgatctnnnnnnacatcacttggctggtgagtcccataaa

SEQ ID NO: 1107 - DNA, 59 bp, synthetic construct
  source 1..59: mol_type = other DNA
cctacacgacgctcttccgatctnnnnnnacatcaagttgtatatggtggtgggaactt

SEQ ID NO: 1108 - DNA, 59 bp, synthetic construct
  source 1..59: mol_type = other DNA
cctacacgacgctcttccgatctnnnnnnacatcagttacagagcaacactggcataac

SEQ ID NO: 1109 - DNA, 58 bp, synthetic construct
  source 1..58: mol_type = other DNA
cctacacgacgctcttccgatctnnnnnnacatcatgcaccaatccaaacctgataga

SEQ ID NO: 1110 - DNA, 59 bp, synthetic construct
  source 1..59: mol_type = other DNA
cctacacgacgctcttccgatctnnnnnnacatcaggatattagctccagcggtgtaaa

SEQ ID NO: 1111 - DNA, 58 bp, synthetic construct
  source 1..58: mol_type = other DNA
cctacacgacgctcttccgatctnnnnnnacatcagattcctgcagaggatcaagaca

SEQ ID NO: 1112 - DNA, 56 bp, synthetic construct
  source 1..56: mol_type = other DNA
cctacacgacgctcttccgatctnnnnnnacatcatctactgtctcgtcggctacc

SEQ ID NO: 1113 - DNA, 58 bp, synthetic construct
  source 1..58: mol_type = other DNA
cctacacgacgctcttccgatctnnnnnnacatcacagaccagatgtgctgaagagaa

SEQ ID NO: 1114 - DNA, 55 bp, synthetic construct
  source 1..55: mol_type = other DNA
cctacacgacgctcttccgatctnnnnnnacatcaaccaacgggaccagcataaa

SEQ ID NO: 1115 - DNA, 57 bp, synthetic construct
  source 1..57: mol_type = other DNA
cctacacgacgctcttccgatctnnnnnnacatcaatcgcgcccatctaggttattt

SEQ ID NO: 1116 - DNA, 57 bp, synthetic construct
  source 1..57: mol_type = other DNA
cctacacgacgctcttccgatctnnnnnnacatcaaacatcacccagaaccagaagg

SEQ ID NO: 1117 - DNA, 59 bp, synthetic construct
  source 1..59: mol_type = other DNA
cctacacgacgctcttccgatctnnnnnnacatcactgggaccataccaaaggagatac

SEQ ID NO: 1118 - DNA, 57 bp, synthetic construct
  source 1..57: mol_type = other DNA
cctacacgacgctcttccgatctnnnnnnacatcatgaagtagccttccgtgagaac

SEQ ID NO: 1119 - DNA, 59 bp, synthetic construct
  source 1..59: mol_type = other DNA
cctacacgacgctcttccgatctnnnnnnacatcacactatctttgacccgagtgagtt

SEQ ID NO: 1120 - DNA, 57 bp, synthetic construct
  source 1..57: mol_type = other DNA
cctacacgacgctcttccgatctnnnnnnacatcaccctgacaggttgaagcaagta

SEQ ID NO: 1121 - DNA, 56 bp, synthetic construct
  source 1..56: mol_type = other DNA
cctacacgacgctcttccgatctnnnnnnacatcagaggaagaggaggaggaggag

SEQ ID NO: 1122 - DNA, 60 bp, synthetic construct
  source 1..60: mol_type = other DNA
cctacacgacgctcttccgatctnnnnnnacatcatcccagaggctccaaagatataaag

SEQ ID NO: 1123 - DNA, 57 bp, synthetic construct
  source 1..57: mol_type = other DNA
cctacacgacgctcttccgatctnnnnnnacatcaggaagtcccttgccatcctaaa

SEQ ID NO: 1124 - DNA, 59 bp, synthetic construct
  source 1..59: mol_type = other DNA
cctacacgacgctcttccgatctnnnnnnacatcagagtcccaagtgagtgagaacatc

SEQ ID NO: 1125 - DNA, 59 bp, synthetic construct
  source 1..59: mol_type = other DNA
cctacacgacgctcttccgatctnnnnnnacatcaggtccagggaactgtgttcaatta

SEQ ID NO: 1126 - DNA, 58 bp, synthetic construct
  source 1..58: mol_type = other DNA
cctacacgacgctcttccgatctnnnnnnacatcaccttcagtaggaccttgctgttt

SEQ ID NO: 1127 - DNA, 59 bp, synthetic construct
  source 1..59: mol_type = other DNA
cctacacgacgctcttccgatctnnnnnnacatcacctgtataacagtgtccgcagaag

SEQ ID NO: 1128 - DNA, 58 bp, synthetic construct
  source 1..58: mol_type = other DNA
cctacacgacgctcttccgatctnnnnnnacatcaggacagaggctgagtttgaagag

SEQ ID NO: 1129 - DNA, 58 bp, synthetic construct
  source 1..58: mol_type = other DNA
cctacacgacgctcttccgatctnnnnnnacatcatccagagtgctcatcatcatgtc

SEQ ID NO: 1130 - DNA, 57 bp, synthetic construct
  source 1..57: mol_type = other DNA
cctacacgacgctcttccgatctnnnnnnacatcagctggaggacgaggaactaaag

SEQ ID NO: 1131 - DNA, 57 bp, synthetic construct
  source 1..57: mol_type = other DNA
cctacacgacgctcttccgatctnnnnnnacatcattggctgtgtgatggatgagaa

SEQ ID NO: 1132 - DNA, 60 bp, synthetic construct
  source 1..60: mol_type = other DNA
cctacacgacgctcttccgatctnnnnnnacatcactggagatgaatgtagggaagaagg

SEQ ID NO: 1133 - DNA, 59 bp, synthetic construct
  source 1..59: mol_type = other DNA
cctacacgacgctcttccgatctnnnnnnacatcacctggacatcaacttcctcatcaa

SEQ ID NO: 1134 - DNA, 59 bp, synthetic construct
  source 1..59: mol_type = other DNA
cctacacgacgctcttccgatctnnnnnnacatcaccacagcgaatgaacatcctaaac

SEQ ID NO: 1135 - DNA, 58 bp, synthetic construct
  source 1..58: mol_type = other DNA
cctacacgacgctcttccgatctnnnnnnacatcacaaccaaggcagggaaagataag

SEQ ID NO: 1136 - DNA, 57 bp, synthetic construct
  source 1..57: mol_type = other DNA
cctacacgacgctcttccgatctnnnnnnacatcacctgggccttgctgttaaattc

SEQ ID NO: 1137 - DNA, 59 bp, synthetic construct
  source 1..59: mol_type = other DNA
cctacacgacgctcttccgatctnnnnnnacatcaaagccatatcccagctcagtaaag

SEQ ID NO: 1138 - DNA, 60 bp, synthetic construct
  source 1..60: mol_type = other DNA
cctacacgacgctcttccgatctnnnnnnacatcacctagaggctgactcaactgaaatc

SEQ ID NO: 1139 - DNA, 60 bp, synthetic construct
  source 1..60: mol_type = other DNA
cctacacgacgctcttccgatctnnnnnnacatcacaggtcattcagatgtagcggataa

SEQ ID NO: 1140 - DNA, 61 bp, synthetic construct
  source 1..61: mol_type = other DNA
cctacacgacgctcttccgatctnnnnnnacatcagtcacaaggacatcgacctgttatta

SEQ ID NO: 1141 - DNA, 59 bp, synthetic construct
  source 1..59: mol_type = other DNA
cctacacgacgctcttccgatctnnnnnnacatcaggaacccaggagaaagatgagaaa

SEQ ID NO: 1142 - DNA, 57 bp, synthetic construct
  source 1..57: mol_type = other DNA
cctacacgacgctcttccgatctnnnnnnacatcagtggaaggatcgactcggtaaa

SEQ ID NO: 1143 - DNA, 57 bp, synthetic construct
  source 1..57: mol_type = other DNA
cctacacgacgctcttccgatctnnnnnnacatcacaaaggagaagtgggtccagaa

SEQ ID NO: 1144 - DNA, 59 bp, synthetic construct
  source 1..59: mol_type = other DNA
cctacacgacgctcttccgatctnnnnnnacatcactggccagggtcagagttaaatag

SEQ ID NO: 1145 - DNA, 58 bp, synthetic construct
  source 1..58: mol_type = other DNA
cctacacgacgctcttccgatctnnnnnnacatcaaggcgtaagggaactcataaagg

SEQ ID NO: 1146 - DNA, 56 bp, synthetic construct
  source 1..56: mol_type = other DNA
cctacacgacgctcttccgatctnnnnnnacatcacaggatgggcttcgagaaaga

SEQ ID NO: 1147 - DNA, 58 bp, synthetic construct
  source 1..58: mol_type = other DNA
cctacacgacgctcttccgatctnnnnnnacatcaggctcaggcactatcccatttat

SEQ ID NO: 1148 - DNA, 59 bp, synthetic construct
  source 1..59: mol_type = other DNA
cctacacgacgctcttccgatctnnnnnnacatcagagagaggcttgcttgggatatag

SEQ ID NO: 1149 - DNA, 58 bp, synthetic construct
  source 1..58: mol_type = other DNA
cctacacgacgctcttccgatctnnnnnnacatcaggtcgtgagtgtggctgaaatta

SEQ ID NO: 1150 - DNA, 58 bp, synthetic construct
  source 1..58: mol_type = other DNA
cctacacgacgctcttccgatctnnnnnnacatcatgggctcaaccgtgaagttatag

SEQ ID NO: 1151 - DNA, 59 bp, synthetic construct
  source 1..59: mol_type = other DNA
cctacacgacgctcttccgatctnnnnnnacatcagacagccagatcccacatctatac

SEQ ID NO: 1152 - DNA, 58 bp, synthetic construct
  source 1..58: mol_type = other DNA
cctacacgacgctcttccgatctnnnnnnacatcagctgtgcagaggaggagaaatta

SEQ ID NO: 1153 - DNA, 58 bp, synthetic construct
  source 1..58: mol_type = other DNA
cctacacgacgctcttccgatctnnnnnnacatcaccagagggaagactttggagaag

SEQ ID NO: 1154 - DNA, 59 bp, synthetic construct
  source 1..59: mol_type = other DNA
cctacacgacgctcttccgatctnnnnnnacatcaggagcagcctggttatttcctatc

SEQ ID NO: 1155 - DNA, 58 bp, synthetic construct
  source 1..58: mol_type = other DNA
cctacacgacgctcttccgatctnnnnnnacatcaggcacagctcagagacataaaga

SEQ ID NO: 1156 - DNA, 57 bp, synthetic construct
  source 1..57: mol_type = other DNA
cctacacgacgctcttccgatctnnnnnnacatcacactcacaccttgcatttcacc

SEQ ID NO: 1157 - DNA, 59 bp, synthetic construct
  source 1..59: mol_type = other DNA
cctacacgacgctcttccgatctnnnnnnacatcacaggatcttggtaccgatggaatc

SEQ ID NO: 1158 - DNA, 56 bp, synthetic construct
  source 1..56: mol_type = other DNA
cctacacgacgctcttccgatctnnnnnnacatcaccaaggccctgggaagataaa

SEQ ID NO: 1159 - DNA, 57 bp, synthetic construct
  source 1..57: mol_type = other DNA
cctacacgacgctcttccgatctnnnnnnacatcaggttccaccctcatgggataaa

SEQ ID NO: 1160 - DNA, 59 bp, synthetic construct
  source 1..59: mol_type = other DNA
cctacacgacgctcttccgatctnnnnnnacatcatgaaggagctaggagtgggaatag

SEQ ID NO: 1161 - DNA, 58 bp, synthetic construct
  source 1..58: mol_type = other DNA
cctacacgacgctcttccgatctnnnnnnacatcaggttcgcttgctttgggatttag

SEQ ID NO: 1162 - DNA, 59 bp, synthetic construct
  source 1..59: mol_type = other DNA
cctacacgacgctcttccgatctnnnnnnacatcatgatgaccagttgtcagggattag

SEQ ID NO: 1163 - DNA, 58 bp, synthetic construct
  source 1..58: mol_type = other DNA
cctacacgacgctcttccgatctnnnnnnacatcacagactgccagagatcgaaagaa

SEQ ID NO: 1164 - DNA, 59 bp, synthetic construct
  source 1..59: mol_type = other DNA
cctacacgacgctcttccgatctnnnnnnacatcaccaccaggagtatttagccatctg

SEQ ID NO: 1165 - DNA, 56 bp, synthetic construct
  source 1..56: mol_type = other DNA
cctacacgacgctcttccgatctnnnnnnacatcagtcaggcaggaagaacgatgt

SEQ ID NO: 1166 - DNA, 59 bp, synthetic construct
  source 1..59: mol_type = other DNA
cctacacgacgctcttccgatctnnnnnnacatcaccaatgacctagagacacgagaag

SEQ ID NO: 1167 - DNA, 58 bp, synthetic construct
  source 1..58: mol_type = other DNA
cctacacgacgctcttccgatctnnnnnnacatcatatgccctcgggcttgtatattg

SEQ ID NO: 1168 - DNA, 59 bp, synthetic construct
  source 1..59: mol_type = other DNA
cctacacgacgctcttccgatctnnnnnnacatcaggagatggagttcttgtgccatag

SEQ ID NO: 1169 - DNA, 57 bp, synthetic construct
  source 1..57: mol_type = other DNA
cctacacgacgctcttccgatctnnnnnnacatcatagcagctcctttgagcatgag

SEQ ID NO: 1170 - DNA, 57 bp, synthetic construct
  source 1..57: mol_type = other DNA
cctacacgacgctcttccgatctnnnnnnacatcatctggacacctaccatgcattc

SEQ ID NO: 1171 - DNA, 59 bp, synthetic construct
  source 1..59: mol_type = other DNA
cctacacgacgctcttccgatctnnnnnnacatcactgaagcagacataccaggagaaa

SEQ ID NO: 1172 - DNA, 60 bp, synthetic construct
  source 1..60: mol_type = other DNA
cctacacgacgctcttccgatctnnnnnnacatcagacactgtctggacacaaggataag

SEQ ID NO: 1173 - DNA, 59 bp, synthetic construct
  source 1..59: mol_type = other DNA
cctacacgacgctcttccgatctnnnnnnacatcacagtggacaccttaacttccagat

SEQ ID NO: 1174 - DNA, 58 bp, synthetic construct
  source 1..58: mol_type = other DNA
cctacacgacgctcttccgatctnnnnnnacatcatcagggccatctcagctataaac

SEQ ID NO: 1175 - DNA, 55 bp, synthetic construct
  source 1..55: mol_type = other DNA
cctacacgacgctcttccgatctnnnnnnacatcattctgcctgtgttcccttgt

SEQ ID NO: 1176 - DNA, 59 bp, synthetic construct
  source 1..59: mol_type = other DNA
cctacacgacgctcttccgatctnnnnnnacatcactacagccaccttctgtgttactt

SEQ ID NO: 1177 - DNA, 57 bp, synthetic construct
  source 1..57: mol_type = other DNA
cctacacgacgctcttccgatctnnnnnnacatcacgactccgagagcatgcttaat

SEQ ID NO: 1178 - DNA, 59 bp, synthetic construct
  source 1..59: mol_type = other DNA
cctacacgacgctcttccgatctnnnnnnacatcaggaacacctagaacactggtaagg

SEQ ID NO: 1179 - DNA, 59 bp, synthetic construct
  source 1..59: mol_type = other DNA
cctacacgacgctcttccgatctnnnnnnacatcagccatctctgtctttagctcctac

SEQ ID NO: 1180 - DNA, 55 bp, synthetic construct
  source 1..55: mol_type = other DNA
cctacacgacgctcttccgatctnnnnnnacatcatttgccttccacaccgagtt

SEQ ID NO: 1181 - DNA, 60 bp, synthetic construct
  source 1..60: mol_type = other DNA
cctacacgacgctcttccgatctnnnnnnacatcacgagtacacaaagagcctggataac

SEQ ID NO: 1182 - DNA, 56 bp, synthetic construct
  source 1..56: mol_type = other DNA
cctacacgacgctcttccgatctnnnnnnacatcactccagagctgccagaagaaa

SEQ ID NO: 1183 - DNA, 57 bp, synthetic construct
  source 1..57: mol_type = other DNA
cctacacgacgctcttccgatctnnnnnnacatcacagcagatggaagaactgggaa

SEQ ID NO: 1184 - DNA, 56 bp, synthetic construct
  source 1..56: mol_type = other DNA
cctacacgacgctcttccgatctnnnnnnacatcagagtgcgggaggcatcttaat

SEQ ID NO: 1185 - DNA, 59 bp, synthetic construct
  source 1..59: mol_type = other DNA
cctacacgacgctcttccgatctnnnnnnacatcagcaactgggctctaatctcctaaa

SEQ ID NO: 1186 - DNA, 57 bp, synthetic construct
  source 1..57: mol_type = other DNA
cctacacgacgctcttccgatctnnnnnnacatcacagacactttccgtggctactt

SEQ ID NO: 1187 - DNA, 59 bp, synthetic construct
  source 1..59: mol_type = other DNA
cctacacgacgctcttccgatctnnnnnnacatcaacacaagtgcgatatcaccttaca

SEQ ID NO: 1188 - DNA, 60 bp, synthetic construct
  source 1..60: mol_type = other DNA
cctacacgacgctcttccgatctnnnnnnacatcaacctgacattctggagactgatttc

SEQ ID NO: 1189 - DNA, 60 bp, synthetic construct
  source 1..60: mol_type = other DNA
cctacacgacgctcttccgatctnnnnnnacatcataccatatcccaccagagaggtaag

SEQ ID NO: 1190 - DNA, 60 bp, synthetic construct
  source 1..60: mol_type = other DNA
cctacacgacgctcttccgatctnnnnnnacatcagtcatgtccttcacagggagaatta

SEQ ID NO: 1191 - DNA, 58 bp, synthetic construct
  source 1..58: mol_type = other DNA
cctacacgacgctcttccgatctnnnnnnacatcagtctttggtgctggcttactttc

SEQ ID NO: 1192 - DNA, 58 bp, synthetic construct
  source 1..58: mol_type = other DNA
cctacacgacgctcttccgatctnnnnnnacatcacagggtgatgccaggttctattt

SEQ ID NO: 1193 - DNA, 58 bp, synthetic construct
  source 1..58: mol_type = other DNA
cctacacgacgctcttccgatctnnnnnnacatcacattgtggaaggtgtagggagtg

SEQ ID NO: 1194 - DNA, 58 bp, synthetic construct
  source 1..58: mol_type = other DNA
cctacacgacgctcttccgatctnnnnnnacatcacagaccaagcgcaaagtagaaac

SEQ ID NO: 1195 - DNA, 58 bp, synthetic construct
  source 1..58: mol_type = other DNA
cctacacgacgctcttccgatctnnnnnnacatcaagagatgcaacacaggagaaaga

SEQ ID NO: 1196 - DNA, 58 bp, synthetic construct
  source 1..58: mol_type = other DNA
cctacacgacgctcttccgatctnnnnnnacatcacgggtgacaaaccaaacactaac

SEQ ID NO: 1197 - DNA, 58 bp, synthetic construct
  source 1..58: mol_type = other DNA
cctacacgacgctcttccgatctnnnnnnacatcagacctgttcttcgtctccatctc

SEQ ID NO: 1198 - DNA, 57 bp, synthetic construct
  source 1..57: mol_type = other DNA
cctacacgacgctcttccgatctnnnnnnacatcagcatcaccaccgtgtctaagaa

SEQ ID NO: 1199 - DNA, 57 bp, synthetic construct
  source 1..57: mol_type = other DNA
cctacacgacgctcttccgatctnnnnnnacatcaccacctgctgcctgaagtatta

SEQ ID NO: 1200 - DNA, 59 bp, synthetic construct
  source 1..59: mol_type = other DNA
cctacacgacgctcttccgatctnnnnnnacatcagtatgttctctcgcagaaggactg

SEQ ID NO: 1201 - DNA, 57 bp, synthetic construct
  source 1..57: mol_type = other DNA
cctacacgacgctcttccgatctnnnnnnacatcatccctgtctccaactccagtaa

SEQ ID NO: 1202 - DNA, 59 bp, synthetic construct
  source 1..59: mol_type = other DNA
cctacacgacgctcttccgatctnnnnnnacatcactctttcttactccctctctccct

SEQ ID NO: 1203 - DNA, 57 bp, synthetic construct
  source 1..57: mol_type = other DNA
cctacacgacgctcttccgatctnnnnnnacatcaggcaacagcatgggtgaataag

SEQ ID NO: 1204 - DNA, 57 bp, synthetic construct
  source 1..57: mol_type = other DNA
cctacacgacgctcttccgatctnnnnnnacatcacagttcttcgtgcctgagactt

SEQ ID NO: 1205 - DNA, 59 bp, synthetic construct
  source 1..59: mol_type = other DNA
cctacacgacgctcttccgatctnnnnnnacatcaccacacagaatcagaagggatgaa

SEQ ID NO: 1206 - DNA, 59 bp, synthetic construct
  source 1..59: mol_type = other DNA
cctacacgacgctcttccgatctnnnnnnacatcagttgactgcatctccctgatagac

SEQ ID NO: 1207 - DNA, 59 bp, synthetic construct
  source 1..59: mol_type = other DNA
cctacacgacgctcttccgatctnnnnnnacatcaagtttggagcgagaagtcagtaaa

SEQ ID NO: 1208 - DNA, 60 bp, synthetic construct
  source 1..60: mol_type = other DNA
cctacacgacgctcttccgatctnnnnnnacatcaactcttccgagtctactccaatttc

SEQ ID NO: 1209 - DNA, 59 bp, synthetic construct
  source 1..59: mol_type = other DNA
cctacacgacgctcttccgatctnnnnnnacatcaagaaaggactgaaccagggtattt

SEQ ID NO: 1210 - DNA, 58 bp, synthetic construct
  source 1..58: mol_type = other DNA
cctacacgacgctcttccgatctnnnnnnacatcacacacctcctcgctgtagtattt

SEQ ID NO: 1211 - DNA, 59 bp, synthetic construct
  source 1..59: mol_type = other DNA
cctacacgacgctcttccgatctnnnnnnacatcaggctgagactaacccagaaacatc

SEQ ID NO: 1212 - DNA, 59 bp, synthetic construct
  source 1..59: mol_type = other DNA
cctacacgacgctcttccgatctnnnnnnacatcagaatctgtctcaggaagggtaagg

SEQ ID NO: 1213 - DNA, 58 bp, synthetic construct
  source 1..58: mol_type = other DNA
cctacacgacgctcttccgatctnnnnnnacatcatgaacacagctggtcacagataa

SEQ ID NO: 1214 - DNA, 60 bp, synthetic construct
  source 1..60: mol_type = other DNA
cctacacgacgctcttccgatctnnnnnnacatcagatctcaggagctttagggagaaga

SEQ ID NO: 1215 - DNA, 59 bp, synthetic construct
  source 1..59: mol_type = other DNA
cctacacgacgctcttccgatctnnnnnnacatcacctccaccaaaggacaaactaaga

SEQ ID NO: 1216 - DNA, 57 bp, synthetic construct
  source 1..57: mol_type = other DNA
cctacacgacgctcttccgatctnnnnnnacatcaaagtgaacctggtggtgatgag

SEQ ID NO: 1217 - DNA, 57 bp, synthetic construct
  source 1..57: mol_type = other DNA
cctacacgacgctcttccgatctnnnnnnacatcacctcagtgtgcccatctgtaaa

SEQ ID NO: 1218 - DNA, 59 bp, synthetic construct
  source 1..59: mol_type = other DNA
cctacacgacgctcttccgatctnnnnnnacatcaggtctttcttctgttgggtgctat

SEQ ID NO: 1219 - DNA, 59 bp, synthetic construct
  source 1..59: mol_type = other DNA
cctacacgacgctcttccgatctnnnnnnacatcagttcctccacaacatggactactt

SEQ ID NO: 1220 - DNA, 58 bp, synthetic construct
  source 1..58: mol_type = other DNA
cctacacgacgctcttccgatctnnnnnnacatcacgtgaatgaggagttgccatcta

SEQ ID NO: 1221 - DNA, 57 bp, synthetic construct
  source 1..57: mol_type = other DNA
cctacacgacgctcttccgatctnnnnnnacatcaggcaaggaatggcagtgtaaag

SEQ ID NO: 1222 - DNA, 59 bp, synthetic construct
  source 1..59: mol_type = other DNA
cctacacgacgctcttccgatctnnnnnnacatcacacctggaatggatactacgagtg

SEQ ID NO: 1223 - DNA, 57 bp, synthetic construct
  source 1..57: mol_type = other DNA
cctacacgacgctcttccgatctnnnnnnacatcatcagggctatgtgattgagtgg

SEQ ID NO: 1224 - DNA, 57 bp, synthetic construct
  source 1..57: mol_type = other DNA
cctacacgacgctcttccgatctnnnnnnacatcaaccctggtggtcccatttattt

SEQ ID NO: 1225 - DNA, 60 bp, synthetic construct
  source 1..60: mol_type = other DNA
cctacacgacgctcttccgatctnnnnnnacatcacagagatggtgagaaggcagatatt

SEQ ID NO: 1226 - DNA, 57 bp, synthetic construct
  source 1..57: mol_type = other DNA
cctacacgacgctcttccgatctnnnnnnacatcagcgacggtcaccttcatctaaa

SEQ ID NO: 1227 - DNA, 59 bp, synthetic construct
  source 1..59: mol_type = other DNA
cctacacgacgctcttccgatctnnnnnnacatcacagtgctctttacccagaggatac

SEQ ID NO: 1228 - DNA, 59 bp, synthetic construct
  source 1..59: mol_type = other DNA
cctacacgacgctcttccgatctnnnnnnacatcatcctgaaccatgaggtcgataatg

SEQ ID NO: 1229 - DNA, 57 bp, synthetic construct
  source 1..57: mol_type = other DNA
cctacacgacgctcttccgatctnnnnnnacatcaaacaccttcctgacaccatgag

SEQ ID NO: 1230 - DNA, 57 bp, synthetic construct
  source 1..57: mol_type = other DNA
cctacacgacgctcttccgatctnnnnnnacatcaatcagtcaccgaaggtcctaca

SEQ ID NO: 1231 - DNA, 60 bp, synthetic construct
  source 1..60: mol_type = other DNA
cctacacgacgctcttccgatctnnnnnnacatcacttccacaggaaccacagagataag

SEQ ID NO: 1232 - DNA, 57 bp, synthetic construct
  source 1..57: mol_type = other DNA
cctacacgacgctcttccgatctnnnnnnacatcacggtggacgtggctgaatataa

SEQ ID NO: 1233 - DNA, 57 bp, synthetic construct
  source 1..57: mol_type = other DNA
cctacacgacgctcttccgatctnnnnnnacatcattacaggaccagagggacaaga

SEQ ID NO: 1234 - DNA, 60 bp, synthetic construct
  source 1..60: mol_type = other DNA
cctacacgacgctcttccgatctnnnnnnacatcactcgtagccatctctctactcctac

SEQ ID NO: 1235 - DNA, 59 bp, synthetic construct
  source 1..59: mol_type = other DNA
cctacacgacgctcttccgatctnnnnnnacatcagtactctgggacctttgactgttt

SEQ ID NO: 1236 - DNA, 58 bp, synthetic construct
  source 1..58: mol_type = other DNA
cctacacgacgctcttccgatctnnnnnnacatcacggtagctcagaggtttgaagat

SEQ ID NO: 1237 - DNA, 57 bp, synthetic construct
  source 1..57: mol_type = other DNA
cctacacgacgctcttccgatctnnnnnnacatcaatccaggagggaaccgaataac

SEQ ID NO: 1238 - DNA, 58 bp, synthetic construct
  source 1..58: mol_type = other DNA
cctacacgacgctcttccgatctnnnnnnacatcatggctcatgcctgtaatcctaac

SEQ ID NO: 1239 - DNA, 57 bp, synthetic construct
  source 1..57: mol_type = other DNA
cctacacgacgctcttccgatctnnnnnnacatcagcagaaacatacgacctgcaac

SEQ ID NO: 1240 - DNA, 61 bp, synthetic construct
  source 1..61: mol_type = other DNA
cctacacgacgctcttccgatctnnnnnnacatcatacaatgaatcacgcaaccactaaag

SEQ ID NO: 1241 - DNA, 58 bp, synthetic construct
  source 1..58: mol_type = other DNA
cctacacgacgctcttccgatctnnnnnnacatcactagagtgcagtggtgcgattat

SEQ ID NO: 1242 - DNA, 59 bp, synthetic construct
  source 1..59: mol_type = other DNA
cctacacgacgctcttccgatctnnnnnnacatcacgaaggaccttgtgggtgatatag

SEQ ID NO: 1243 - DNA, 60 bp, synthetic construct
  source 1..60: mol_type = other DNA
cctacacgacgctcttccgatctnnnnnnacatcactgtagctcctcaactcacctaatg

SEQ ID NO: 1244 - DNA, 57 bp, synthetic construct
  source 1..57: mol_type = other DNA
cctacacgacgctcttccgatctnnnnnnacatcaatgagccaggagtctggaattg

SEQ ID NO: 1245 - DNA, 55 bp, synthetic construct
  source 1..55: mol_type = other DNA
cctacacgacgctcttccgatctnnnnnnacatcagcagcctcacctctgagaaa

SEQ ID NO: 1246 - DNA, 58 bp, synthetic construct
  source 1..58: mol_type = other DNA
cctacacgacgctcttccgatctnnnnnnacatcaaacgggaaggttctgaagaagag

SEQ ID NO: 1247 - DNA, 57 bp, synthetic construct
  source 1..57: mol_type = other DNA
cctacacgacgctcttccgatctnnnnnnacatcaggacaagcagtcacctcagtaa

SEQ ID NO: 1248 - DNA, 55 bp, synthetic construct
  source 1..55: mol_type = other DNA
cctacacgacgctcttccgatctnnnnnnacatcactcagctcctggtgaagctc

SEQ ID NO: 1249 - DNA, 60 bp, synthetic construct
  source 1..60: mol_type = other DNA
cctacacgacgctcttccgatctnnnnnnacatcatcctcaatgacactggcaactatac

SEQ ID NO: 1250 - DNA, 59 bp, synthetic construct
  source 1..59: mol_type = other DNA
cctacacgacgctcttccgatctnnnnnnacatcaagaaccttcccaagagacctacta

SEQ ID NO: 1251 - DNA, 55 bp, synthetic construct
  source 1..55: mol_type = other DNA
cctacacgacgctcttccgatctnnnnnnacatcaagcgatcaagcagcgactat

SEQ ID NO: 1252 - DNA, 58 bp, synthetic construct
  source 1..58: mol_type = other DNA
cctacacgacgctcttccgatctnnnnnnacatcaaacccagagaacctgctttactt

SEQ ID NO: 1253 - DNA, 58 bp, synthetic construct
  source 1..58: mol_type = other DNA
cctacacgacgctcttccgatctnnnnnnacatcagggaggttgtctggagaactaaa

SEQ ID NO: 1254 - DNA, 59 bp, synthetic construct
  source 1..59: mol_type = other DNA
cctacacgacgctcttccgatctnnnnnnacatcagcctctttgtgaggaggacattag

SEQ ID NO: 1255 - DNA, 59 bp, synthetic construct
  source 1..59: mol_type = other DNA
cctacacgacgctcttccgatctnnnnnnacatcacccaggaagtgtcaatgtttgttg

SEQ ID NO: 1256 - DNA, 58 bp, synthetic construct
  source 1..58: mol_type = other DNA
cctacacgacgctcttccgatctnnnnnnacatcactgaagcagatgcaggacaagta

SEQ ID NO: 1257 - DNA, 58 bp, synthetic construct
  source 1..58: mol_type = other DNA
cctacacgacgctcttccgatctnnnnnnacatcaccatcccagctatcctgttcttg

SEQ ID NO: 1258 - DNA, 60 bp, synthetic construct
  source 1..60: mol_type = other DNA
cctacacgacgctcttccgatctnnnnnnacatcagccaaggagtgctaaagaacttaga

SEQ ID NO: 1259 - DNA, 58 bp, synthetic construct
  source 1..58: mol_type = other DNA
cctacacgacgctcttccgatctnnnnnnacatcatggagtcagtgaagaagctcaaa

SEQ ID NO: 1260 - DNA, 61 bp, synthetic construct
  source 1..61: mol_type = other DNA
cctacacgacgctcttccgatctnnnnnnacatcagagatatgaggagagagagacagagg

SEQ ID NO: 1261 - DNA, 60 bp, synthetic construct
  source 1..60: mol_type = other DNA
cctacacgacgctcttccgatctnnnnnnacatcagaagaatcagggagtcccagtaaag

SEQ ID NO: 1262 - DNA, 58 bp, synthetic construct
  source 1..58: mol_type = other DNA
cctacacgacgctcttccgatctnnnnnnacatcagtccctggtgttcttcctgatac

SEQ ID NO: 1263 - DNA, 57 bp, synthetic construct
  source 1..57: mol_type = other DNA
cctacacgacgctcttccgatctnnnnnnacatcacacaggagccaagagtgaagaa

SEQ ID NO: 1264 - DNA, 58 bp, synthetic construct
  source 1..58: mol_type = other DNA
cctacacgacgctcttccgatctnnnnnnacatcacagcctcaagatcctctccaaag

SEQ ID NO: 1265 - DNA, 59 bp, synthetic construct
  source 1..59: mol_type = other DNA
cctacacgacgctcttccgatctnnnnnnacatcaaatatctcctggcgctcagattac

SEQ ID NO: 1266 - DNA, 59 bp, synthetic construct
  source 1..59: mol_type = other DNA
cctacacgacgctcttccgatctnnnnnnacatcagtgtaacctcagaagtgggagtga

SEQ ID NO: 1267 - DNA, 57 bp, synthetic construct
  source 1..57: mol_type = other DNA
cctacacgacgctcttccgatctnnnnnnacatcacaactgatagccacgctgaaga

SEQ ID NO: 1268 - DNA, 59 bp, synthetic construct
  source 1..59: mol_type = other DNA
cctacacgacgctcttccgatctnnnnnnacatcagcaggttctcttcctctcacatac

SEQ ID NO: 1269 - DNA, 56 bp, synthetic construct
  source 1..56: mol_type = other DNA
cctacacgacgctcttccgatctnnnnnnacatcagagacctaccaggccaacaat

SEQ ID NO: 1270 - DNA, 56 bp, synthetic construct
  source 1..56: mol_type = other DNA
cctacacgacgctcttccgatctnnnnnnacatcatgctctccaagacccaaagac

SEQ ID NO: 1271 - DNA, 58 bp, synthetic construct
  source 1..58: mol_type = other DNA
cctacacgacgctcttccgatctnnnnnnacatcagtcgtgaagagggagctctattg

SEQ ID NO: 1272 - DNA, 60 bp, synthetic construct
  source 1..60: mol_type = other DNA
cctacacgacgctcttccgatctnnnnnnacatcacaagctgaacagagaaagtggattg

SEQ ID NO: 1273 - DNA, 61 bp, synthetic construct
  source 1..61: mol_type = other DNA
cctacacgacgctcttccgatctnnnnnnacatcacagctcttcctatgactatggagaaa

SEQ ID NO: 1274 - DNA, 59 bp, synthetic construct
  source 1..59: mol_type = other DNA
cctacacgacgctcttccgatctnnnnnnacatcaagagagacagcttgtatgcagaag

SEQ ID NO: 1275 - DNA, 57 bp, synthetic construct
  source 1..57: mol_type = other DNA
cctacacgacgctcttccgatctnnnnnnacatcacgtgctccaccgagatctaaag

SEQ ID NO: 1276 - DNA, 57 bp, synthetic construct
  source 1..57: mol_type = other DNA
cctacacgacgctcttccgatctnnnnnnacatcatgccttccaggttcaagctatt

SEQ ID NO: 1277 - DNA, 57 bp, synthetic construct
  source 1..57: mol_type = other DNA
cctacacgacgctcttccgatctnnnnnnacatcatacagggagagggagcgataaa

SEQ ID NO: 1278 - DNA, 59 bp, synthetic construct
  source 1..59: mol_type = other DNA
cctacacgacgctcttccgatctnnnnnnacatcaccagaagccctacaagaagatgaa

SEQ ID NO: 1279 - DNA, 58 bp, synthetic construct
  source 1..58: mol_type = other DNA
cctacacgacgctcttccgatctnnnnnnacatcaccacatacagggcaatcagaaga

SEQ ID NO: 1280 - DNA, 61 bp, synthetic construct
  source 1..61: mol_type = other DNA
cctacacgacgctcttccgatctnnnnnnacatcacagagagagagagagagagagacaaa

SEQ ID NO: 1281 - DNA, 59 bp, synthetic construct
  source 1..59: mol_type = other DNA
cctacacgacgctcttccgatctnnnnnnacatcagagctcccagtcctaatcacattc

SEQ ID NO: 1282 - DNA, 59 bp, synthetic construct
  source 1..59: mol_type = other DNA
cctacacgacgctcttccgatctnnnnnnacatcacacaggcatacacaggaagataca

SEQ ID NO: 1283 - DNA, 60 bp, synthetic construct
  source 1..60: mol_type = other DNA
cctacacgacgctcttccgatctnnnnnnacatcatatagcgcaggtgtcttccatttac

SEQ ID NO: 1284 - DNA, 59 bp, synthetic construct
  source 1..59: mol_type = other DNA
cctacacgacgctcttccgatctnnnnnnacatcagtagaggaggccacgttcttacta

SEQ ID NO: 1285 - DNA, 57 bp, synthetic construct
  source 1..57: mol_type = other DNA
cctacacgacgctcttccgatctnnnnnnacatcacagctgacaacaggaggagaaa

SEQ ID NO: 1286 - DNA, 60 bp, synthetic construct
  source 1..60: mol_type = other DNA
cctacacgacgctcttccgatctnnnnnnacatcaagacacatagccgagagaagagtag

SEQ ID NO: 1287 - DNA, 59 bp, synthetic construct
  source 1..59: mol_type = other DNA
cctacacgacgctcttccgatctnnnnnnacatcactctccctttgacatcgctgatac

SEQ ID NO: 1288 - DNA, 59 bp, synthetic construct
  source 1..59: mol_type = other DNA
cctacacgacgctcttccgatctnnnnnnacatcagatgatgacgaggaagctgaagaa

SEQ ID NO: 1289 - DNA, 60 bp, synthetic construct
  source 1..60: mol_type = other DNA
cctacacgacgctcttccgatctnnnnnnacatcatcagcagatgtgaaggaactgatta

SEQ ID NO: 1290 - DNA, 56 bp, synthetic construct
  source 1..56: mol_type = other DNA
cctacacgacgctcttccgatctnnnnnnacatcaccatgccaggtgtctgtgata

SEQ ID NO: 1291 - DNA, 61 bp, synthetic construct
  source 1..61: mol_type = other DNA
cctacacgacgctcttccgatctnnnnnnacatcagtctataccaacctcatcaccttcag

SEQ ID NO: 1292 - DNA, 58 bp, synthetic construct
  source 1..58: mol_type = other DNA
cctacacgacgctcttccgatctnnnnnnacatcacgaagtcatagccacactcaaga

SEQ ID NO: 1293 - DNA, 57 bp, synthetic construct
  source 1..57: mol_type = other DNA
cctacacgacgctcttccgatctnnnnnnacatcaggaagaaccagtaccggcatta

SEQ ID NO: 1294 - DNA, 55 bp, synthetic construct
  source 1..55: mol_type = other DNA
cctacacgacgctcttccgatctnnnnnnacatcaggctcttgaaacccgagcat

SEQ ID NO: 1295 - DNA, 57 bp, synthetic construct
  source 1..57: mol_type = other DNA
cctacacgacgctcttccgatctnnnnnnacatcacgagtggaagtctgtggtcatc

SEQ ID NO: 1296 - DNA, 58 bp, synthetic construct
  source 1..58: mol_type = other DNA
cctacacgacgctcttccgatctnnnnnnacatcacatttcctgctcatgccactaac

SEQ ID NO: 1297 - DNA, 59 bp, synthetic construct
  source 1..59: mol_type = other DNA
cctacacgacgctcttccgatctnnnnnnacatcagtctgtctttgactctgcctatcc

SEQ ID NO: 1298 - DNA, 58 bp, synthetic construct
  source 1..58: mol_type = other DNA
cctacacgacgctcttccgatctnnnnnnacatcagacatcccatctggttcccataa

SEQ ID NO: 1299 - DNA, 57 bp, synthetic construct
  source 1..57: mol_type = other DNA
cctacacgacgctcttccgatctnnnnnnacatcaaggaagagtctaggctgagcaa

SEQ ID NO: 1300 - DNA, 58 bp, synthetic construct
  source 1..58: mol_type = other DNA
cctacacgacgctcttccgatctnnnnnnacatcatcaaacggaacctgaaggagaag

SEQ ID NO: 1301 - DNA, 59 bp, synthetic construct
  source 1..59: mol_type = other DNA
cctacacgacgctcttccgatctnnnnnnacatcactctgctctcttcatcttcatcgg

SEQ ID NO: 1302 - DNA, 57 bp, synthetic construct
  source 1..57: mol_type = other DNA
cctacacgacgctcttccgatctnnnnnnacatcaccacgcaggaagcctactattt

SEQ ID NO: 1303 - DNA, 59 bp, synthetic construct
  source 1..59: mol_type = other DNA
cctacacgacgctcttccgatctnnnnnnacatcaggagaggacgatgatgactttgag

SEQ ID NO: 1304 - DNA, 59 bp, synthetic construct
  source 1..59: mol_type = other DNA
cctacacgacgctcttccgatctnnnnnnacatcacaggacgataagaccgtgtatgag

SEQ ID NO: 1305 - DNA, 59 bp, synthetic construct
  source 1..59: mol_type = other DNA
cctacacgacgctcttccgatctnnnnnnacatcagagaagtgtcccaggacatgataa

SEQ ID NO: 1306 - DNA, 58 bp, synthetic construct
  source 1..58: mol_type = other DNA
cctacacgacgctcttccgatctnnnnnnacatcattacggagtattgctgtgggaaa

SEQ ID NO: 1307 - DNA, 57 bp, synthetic construct
  source 1..57: mol_type = other DNA
cctacacgacgctcttccgatctnnnnnnacatcactgcccttacaggaacagaaga

SEQ ID NO: 1308 - DNA, 58 bp, synthetic construct
  source 1..58: mol_type = other DNA
cctacacgacgctcttccgatctnnnnnnacatcaggaacaaagaggagcctggtaaa

SEQ ID NO: 1309 - DNA, 59 bp, synthetic construct
  source 1..59: mol_type = other DNA
cctacacgacgctcttccgatctnnnnnnacatcacaagatcagcttctcccacgatag

SEQ ID NO: 1310 - DNA, 55 bp, synthetic construct
  source 1..55: mol_type = other DNA
cctacacgacgctcttccgatctnnnnnnacatcaccgagaggcaggctgttaat

SEQ ID NO: 1311 - DNA, 57 bp, synthetic construct
  source 1..57: mol_type = other DNA
cctacacgacgctcttccgatctnnnnnnacatcaatcccatcagcagcagtaagag

SEQ ID NO: 1312 - DNA, 57 bp, synthetic construct
  source 1..57: mol_type = other DNA
cctacacgacgctcttccgatctnnnnnnacatcaagtcatcacatccaagcagagg

SEQ ID NO: 1313 - DNA, 56 bp, synthetic construct
  source 1..56: mol_type = other DNA
cctacacgacgctcttccgatctnnnnnnacatcatggtgttgaggaaagcagaca

SEQ ID NO: 1314 - DNA, 60 bp, synthetic construct
  source 1..60: mol_type = other DNA
cctacacgacgctcttccgatctnnnnnnacatcatactgagcttctctgtgaacgattt

SEQ ID NO: 1315 - DNA, 57 bp, synthetic construct
  source 1..57: mol_type = other DNA
cctacacgacgctcttccgatctnnnnnnacatcaaacttgtcgggaggagcataag

SEQ ID NO: 1316 - DNA, 58 bp, synthetic construct
  source 1..58: mol_type = other DNA
cctacacgacgctcttccgatctnnnnnnacatcagcagtccctatgatgtccagaaa

SEQ ID NO: 1317 - DNA, 59 bp, synthetic construct
  source 1..59: mol_type = other DNA
cctacacgacgctcttccgatctnnnnnnacatcagacagcaaaggagtcggagaaata

SEQ ID NO: 1318 - DNA, 56 bp, synthetic construct
  source 1..56: mol_type = other DNA
cctacacgacgctcttccgatctnnnnnnacatcactggatcactcgccagaactt

SEQ ID NO: 1319 - DNA, 58 bp, synthetic construct
  source 1..58: mol_type = other DNA
cctacacgacgctcttccgatctnnnnnnacatcagagcacatacttggagggagaaa

SEQ ID NO: 1320 - DNA, 58 bp, synthetic construct
  source 1..58: mol_type = other DNA
cctacacgacgctcttccgatctnnnnnnacatcacctctcccagagactacagagaa

SEQ ID NO: 1321 - DNA, 57 bp, synthetic construct
  source 1..57: mol_type = other DNA
cctacacgacgctcttccgatctnnnnnnacatcacattcttggcaatggtcatggg

SEQ ID NO: 1322 - DNA, 55 bp, synthetic construct
  source 1..55: mol_type = other DNA
cctacacgacgctcttccgatctnnnnnnacatcaaggcattacaagcgggagtt

SEQ ID NO: 1323 - DNA, 59 bp, synthetic construct
  source 1..59: mol_type = other DNA
cctacacgacgctcttccgatctnnnnnnacatcatggcgtggtgtcaagtttaataac

SEQ ID NO: 1324 - DNA, 60 bp, synthetic construct
  source 1..60: mol_type = other DNA
cctacacgacgctcttccgatctnnnnnnacatcacagtaattgtacgtcctgggatgat

SEQ ID NO: 1325 - DNA, 57 bp, synthetic construct
  source 1..57: mol_type = other DNA
cctacacgacgctcttccgatctnnnnnnacatcacacacacacacaggaggagaaa

SEQ ID NO: 1326 - DNA, 57 bp, synthetic construct
  source 1..57: mol_type = other DNA
cctacacgacgctcttccgatctnnnnnnacatcaggatgaaaggtgggtgaaagga

SEQ ID NO: 1327 - DNA, 60 bp, synthetic construct
  source 1..60: mol_type = other DNA
cctacacgacgctcttccgatctnnnnnnacatcactgaaggaaagaggaagtgctagag

SEQ ID NO: 1328 - DNA, 59 bp, synthetic construct
  source 1..59: mol_type = other DNA
cctacacgacgctcttccgatctnnnnnnacatcagcttacaaactcggtgaacaactg

SEQ ID NO: 1329 - DNA, 59 bp, synthetic construct
  source 1..59: mol_type = other DNA
cctacacgacgctcttccgatctnnnnnnacatcacctctgctacaacttctctgctac

SEQ ID NO: 1330 - DNA, 59 bp, synthetic construct
  source 1..59: mol_type = other DNA
cctacacgacgctcttccgatctnnnnnnacatcaccaattccggtaggagtaggaaat

SEQ ID NO: 1331 - DNA, 60 bp, synthetic construct
  source 1..60: mol_type = other DNA
cctacacgacgctcttccgatctnnnnnnacatcacattgtgtaagaaggagccctagac

SEQ ID NO: 1332 - DNA, 59 bp, synthetic construct
  source 1..59: mol_type = other DNA
cctacacgacgctcttccgatctnnnnnnacatcacagtcagaggcgctatgtgtatta

SEQ ID NO: 1333 - DNA, 57 bp, synthetic construct
  source 1..57: mol_type = other DNA
cctacacgacgctcttccgatctnnnnnnacatcaggccaagaagccaaccaataag

SEQ ID NO: 1334 - DNA, 58 bp, synthetic construct
  source 1..58: mol_type = other DNA
cctacacgacgctcttccgatctnnnnnnacatcaggaagaggaggtgaacacagaaa

SEQ ID NO: 1335 - DNA, 58 bp, synthetic construct
  source 1..58: mol_type = other DNA
cctacacgacgctcttccgatctnnnnnnacatcatccagtttgtcagtgtctgtgag

SEQ ID NO: 1336 - DNA, 58 bp, synthetic construct
  source 1..58: mol_type = other DNA
cctacacgacgctcttccgatctnnnnnnacatcacctggacccagttgtacctaatc

SEQ ID NO: 1337 - DNA, 59 bp, synthetic construct
  source 1..59: mol_type = other DNA
cctacacgacgctcttccgatctnnnnnnacatcagtgaggaccagaccttgttcataa

SEQ ID NO: 1338 - DNA, 59 bp, synthetic construct
  source 1..59: mol_type = other DNA
cctacacgacgctcttccgatctnnnnnnacatcacaagtatttccgggatgagaggag

SEQ ID NO: 1339 - DNA, 59 bp, synthetic construct
  source 1..59: mol_type = other DNA
cctacacgacgctcttccgatctnnnnnnacatcacccagactcaaggagttggtaaag

SEQ ID NO: 1340 - DNA, 58 bp, synthetic construct
  source 1..58: mol_type = other DNA
cctacacgacgctcttccgatctnnnnnnacatcacagacttcctcctttccgtgttt

SEQ ID NO: 1341 - DNA, 59 bp, synthetic construct
  source 1..59: mol_type = other DNA
cctacacgacgctcttccgatctnnnnnnacatcagagagtgctggagttcaggataac

SEQ ID NO: 1342 - DNA, 58 bp, synthetic construct
  source 1..58: mol_type = other DNA
cctacacgacgctcttccgatctnnnnnnacatcagtatggccttccactcctacttc

SEQ ID NO: 1343 - DNA, 59 bp, synthetic construct
  source 1..59: mol_type = other DNA
cctacacgacgctcttccgatctnnnnnnacatcacactgcctctcctgagtagaaatc

SEQ ID NO: 1344 - DNA, 57 bp, synthetic construct
  source 1..57: mol_type = other DNA
cctacacgacgctcttccgatctnnnnnnacatcaaggaaccagagaaactcagcac

SEQ ID NO: 1345 - DNA, 58 bp, synthetic construct
  source 1..58: mol_type = other DNA
cctacacgacgctcttccgatctnnnnnnacatcacacactaccagaagacagcagaa

SEQ ID NO: 1346 - DNA, 59 bp, synthetic construct
  source 1..59: mol_type = other DNA
cctacacgacgctcttccgatctnnnnnnacatcactactaagcagcatcggacaagac

SEQ ID NO: 1347 - DNA, 58 bp, synthetic construct
  source 1..58: mol_type = other DNA
cctacacgacgctcttccgatctnnnnnnacatcatctgaacctccttgcgtgaataa

SEQ ID NO: 1348 - DNA, 57 bp, synthetic construct
  source 1..57: mol_type = other DNA
cctacacgacgctcttccgatctnnnnnnacatcagcctttcactttggatgctctg

SEQ ID NO: 1349 - DNA, 57 bp, synthetic construct
  source 1..57: mol_type = other DNA
cctacacgacgctcttccgatctnnnnnnacatcacaagggaagaggcacaaagaga

SEQ ID NO: 1350 - DNA, 59 bp, synthetic construct
  source 1..59: mol_type = other DNA
cctacacgacgctcttccgatctnnnnnnacatcaagaagtttcagggaaggtcagaag

SEQ ID NO: 1351 - DNA, 60 bp, synthetic construct
  source 1..60: mol_type = other DNA
cctacacgacgctcttccgatctnnnnnnacatcagaggtggaggtggaaatggtattag

SEQ ID NO: 1352 - DNA, 59 bp, synthetic construct
  source 1..59: mol_type = other DNA
cctacacgacgctcttccgatctnnnnnnacatcaaggtctagctctactgttggtact

SEQ ID NO: 1353 - DNA, 55 bp, synthetic construct
  source 1..55: mol_type = other DNA
cctacacgacgctcttccgatctnnnnnnacatcactgatccgcgcctagagttt

SEQ ID NO: 1354 - DNA, 57 bp, synthetic construct
  source 1..57: mol_type = other DNA
cctacacgacgctcttccgatctnnnnnnacatcacaggtgaagagccagaagtgaa

SEQ ID NO: 1355 - DNA, 59 bp, synthetic construct
  source 1..59: mol_type = other DNA
cctacacgacgctcttccgatctnnnnnnacatcagacatgctctggaggagaaagatt

SEQ ID NO: 1356 - DNA, 59 bp, synthetic construct
  source 1..59: mol_type = other DNA
cctacacgacgctcttccgatctnnnnnnacatcaacgcagagagtgtagagaggataa

SEQ ID NO: 1357 - DNA, 59 bp, synthetic construct
  source 1..59: mol_type = other DNA
cctacacgacgctcttccgatctnnnnnnacatcagcaagcctgtggttatgagtttac

SEQ ID NO: 1358 - DNA, 60 bp, synthetic construct
  source 1..60: mol_type = other DNA
cctacacgacgctcttccgatctnnnnnnacatcattaggcagagagtggatggttattt

SEQ ID NO: 1359 - DNA, 58 bp, synthetic construct
  source 1..58: mol_type = other DNA
cctacacgacgctcttccgatctnnnnnnacatcaggtttctcgatcaggaccatcaa

SEQ ID NO: 1360 - DNA, 59 bp, synthetic construct
  source 1..59: mol_type = other DNA
cctacacgacgctcttccgatctnnnnnnacatcaggaccttgagccacttcctaataa

SEQ ID NO: 1361 - DNA, 58 bp, synthetic construct
  source 1..58: mol_type = other DNA
cctacacgacgctcttccgatctnnnnnnacatcatacctcaactggaacaccaagtc

SEQ ID NO: 1362 - DNA, 59 bp, synthetic construct
  source 1..59: mol_type = other DNA
cctacacgacgctcttccgatctnnnnnnacatcacaaagtgtgatctccctggatctg

SEQ ID NO: 1363 - DNA, 55 bp, synthetic construct
  source 1..55: mol_type = other DNA
cctacacgacgctcttccgatctnnnnnnacatcataccaggagctgaggagtgt

SEQ ID NO: 1364 - DNA, 59 bp, synthetic construct
  source 1..59: mol_type = other DNA
cctacacgacgctcttccgatctnnnnnnacatcagacccaggaagtccagatcattag

SEQ ID NO: 1365 - DNA, 59 bp, synthetic construct
  source 1..59: mol_type = other DNA
cctacacgacgctcttccgatctnnnnnnacatcatcatcaacaccttccaccaatact

SEQ ID NO: 1366 - DNA, 59 bp, synthetic construct
  source 1..59: mol_type = other DNA
cctacacgacgctcttccgatctnnnnnnacatcatgtggattctctgtcaggcattag

SEQ ID NO: 1367 - DNA, 60 bp, synthetic construct
  source 1..60: mol_type = other DNA
cctacacgacgctcttccgatctnnnnnnacatcagactgagagtcagagcttgaagaaa

SEQ ID NO: 1368 - DNA, 60 bp, synthetic construct
  source 1..60: mol_type = other DNA
cctacacgacgctcttccgatctnnnnnnacatcactgtcgtgagtgtctcttgtctaaa

SEQ ID NO: 1369 - DNA, 57 bp, synthetic construct
  source 1..57: mol_type = other DNA
cctacacgacgctcttccgatctnnnnnnacatcagccactgaagaacaggcaaatc

SEQ ID NO: 1370 - DNA, 59 bp, synthetic construct
  source 1..59: mol_type = other DNA
cctacacgacgctcttccgatctnnnnnnacatcactcctagtgatgacagcctcattt

SEQ ID NO: 1371 - DNA, 59 bp, synthetic construct
  source 1..59: mol_type = other DNA
cctacacgacgctcttccgatctnnnnnnacatcaatcactcctccttgcttcaatctc

SEQ ID NO: 1372 - DNA, 59 bp, synthetic construct
  source 1..59: mol_type = other DNA
cctacacgacgctcttccgatctnnnnnnacatcactgagccatggtgaagaaggaata

SEQ ID NO: 1373 - DNA, 58 bp, synthetic construct
  source 1..58: mol_type = other DNA
cctacacgacgctcttccgatctnnnnnnacatcaattctgttgggctgtggagatag

SEQ ID NO: 1374 - DNA, 59 bp, synthetic construct
  source 1..59: mol_type = other DNA
cctacacgacgctcttccgatctnnnnnnacatcaccttctcagatgtgccttctagtg

SEQ ID NO: 1375 - DNA, 57 bp, synthetic construct
  source 1..57: mol_type = other DNA
cctacacgacgctcttccgatctnnnnnnacatcacgagatccgatggaaggtgatt

SEQ ID NO: 1376 - DNA, 58 bp, synthetic construct
  source 1..58: mol_type = other DNA
cctacacgacgctcttccgatctnnnnnnacatcagtcccaatgaaaccaccattcac

SEQ ID NO: 1377 - DNA, 60 bp, synthetic construct
  source 1..60: mol_type = other DNA
cctacacgacgctcttccgatctnnnnnnacatcaccttcggatgtaaacccactgataa

SEQ ID NO: 1378 - DNA, 59 bp, synthetic construct
  source 1..59: mol_type = other DNA
cctacacgacgctcttccgatctnnnnnnacatcacaccacgactaagtaggcactatg

SEQ ID NO: 1379 - DNA, 58 bp, synthetic construct
  source 1..58: mol_type = other DNA
cctacacgacgctcttccgatctnnnnnnacatcacgtctaaggtgtctgctggataa

SEQ ID NO: 1380 - DNA, 57 bp, synthetic construct
  source 1..57: mol_type = other DNA
cctacacgacgctcttccgatctnnnnnnacatcatccctctctccttcgtgaagat

SEQ ID NO: 1381 - DNA, 59 bp, synthetic construct
  source 1..59: mol_type = other DNA
cctacacgacgctcttccgatctnnnnnnacatcagagactctccagaaagagcaacag

SEQ ID NO: 1382 - DNA, 57 bp, synthetic construct
  source 1..57: mol_type = other DNA
cctacacgacgctcttccgatctnnnnnnacatcacttgaccaggacttgggacttt

SEQ ID NO: 1383 - DNA, 57 bp, synthetic construct
  source 1..57: mol_type = other DNA
cctacacgacgctcttccgatctnnnnnnacatcagaggaagtgaagcctggaagaa

SEQ ID NO: 1384 - DNA, 57 bp, synthetic construct
  source 1..57: mol_type = other DNA
cctacacgacgctcttccgatctnnnnnnacatcaagagaccttgccacactgaatc

SEQ ID NO: 1385 - DNA, 59 bp, synthetic construct
  source 1..59: mol_type = other DNA
cctacacgacgctcttccgatctnnnnnnacatcatcctgtaaactccagagcaaatca

SEQ ID NO: 1386 - DNA, 59 bp, synthetic construct
  source 1..59: mol_type = other DNA
cctacacgacgctcttccgatctnnnnnnacatcactaaacggcgctaacctgagataa

SEQ ID NO: 1387 - DNA, 59 bp, synthetic construct
  source 1..59: mol_type = other DNA
cctacacgacgctcttccgatctnnnnnnacatcactgatatggacaccctgcagatac

SEQ ID NO: 1388 - DNA, 59 bp, synthetic construct
  source 1..59: mol_type = other DNA
cctacacgacgctcttccgatctnnnnnnacatcagagcttcctacagcacaacaaatg

SEQ ID NO: 1389 - DNA, 58 bp, synthetic construct
  source 1..58: mol_type = other DNA
cctacacgacgctcttccgatctnnnnnnacatcactgtgtggctgtatggagaaaga

SEQ ID NO: 1390 - DNA, 59 bp, synthetic construct
  source 1..59: mol_type = other DNA
cctacacgacgctcttccgatctnnnnnnacatcaccctcactatgtggagaacattga

SEQ ID NO: 1391 - DNA, 59 bp, synthetic construct
  source 1..59: mol_type = other DNA
cctacacgacgctcttccgatctnnnnnnacatcagagtactacgccaaggaggtttac

SEQ ID NO: 1392 - DNA, 59 bp, synthetic construct
  source 1..59: mol_type = other DNA
cctacacgacgctcttccgatctnnnnnnacatcacctgctactctgttccttcacatc

SEQ ID NO: 1393 - DNA, 56 bp, synthetic construct
  source 1..56: mol_type = other DNA
cctacacgacgctcttccgatctnnnnnnacatcaagccttctctgcctcttgttt

SEQ ID NO: 1394 - DNA, 60 bp, synthetic construct
  source 1..60: mol_type = other DNA
cctacacgacgctcttccgatctnnnnnnacatcaggaactgaatgacatcccaggatta

SEQ ID NO: 1395 - DNA, 58 bp, synthetic construct
  source 1..58: mol_type = other DNA
cctacacgacgctcttccgatctnnnnnnacatcagactgcacttcagaaggagatca

SEQ ID NO: 1396 - DNA, 58 bp, synthetic construct
  source 1..58: mol_type = other DNA
cctacacgacgctcttccgatctnnnnnnacatcagaccttctggtgctgctgataaa

SEQ ID NO: 1397 - DNA, 59 bp, synthetic construct
  source 1..59: mol_type = other DNA
cctacacgacgctcttccgatctnnnnnnacatcacaagaggaggaatagccacagaag

SEQ ID NO: 1398 - DNA, 59 bp, synthetic construct
  source 1..59: mol_type = other DNA
cctacacgacgctcttccgatctnnnnnnacatcagactttcagcctcccaacgtatta

SEQ ID NO: 1399 - DNA, 60 bp, synthetic construct
  source 1..60: mol_type = other DNA
cctacacgacgctcttccgatctnnnnnnacatcagctgtttaggagttagggtgaaaga

SEQ ID NO: 1400 - DNA, 59 bp, synthetic construct
  source 1..59: mol_type = other DNA
cctacacgacgctcttccgatctnnnnnnacatcacagtggtctggctaaagctgatac

SEQ ID NO: 1401 - DNA, 59 bp, synthetic construct
  source 1..59: mol_type = other DNA
cctacacgacgctcttccgatctnnnnnnacatcatctctagtgaaggagcagtggata

SEQ ID NO: 1402 - DNA, 58 bp, synthetic construct
  source 1..58: mol_type = other DNA
cctacacgacgctcttccgatctnnnnnnacatcactgttcagctactagggcaaaga

SEQ ID NO: 1403 - DNA, 59 bp, synthetic construct
  source 1..59: mol_type = other DNA
cctacacgacgctcttccgatctnnnnnnacatcaccttagaaagctgaagacgtggta

SEQ ID NO: 1404 - DNA, 60 bp, synthetic construct
  source 1..60: mol_type = other DNA
cctacacgacgctcttccgatctnnnnnnacatcacaacaagagactggaaggaccataa

SEQ ID NO: 1405 - DNA, 56 bp, synthetic construct
  source 1..56: mol_type = other DNA
cctacacgacgctcttccgatctnnnnnnacatcagaggccaggagttgtgagttt

SEQ ID NO: 1406 - DNA, 59 bp, synthetic construct; identical to SEQ ID NO: 1083
  source 1..59: mol_type = other DNA

SEQ ID NO: 1407 - DNA, 60 bp, synthetic construct
  source 1..60: mol_type = other DNA
cctacacgacgctcttccgatctnnnnnnacatcacatgctcacccatatcccactatac

SEQ ID NO: 1408 - DNA, 57 bp, synthetic construct
  source 1..57: mol_type = other DNA
cctacacgacgctcttccgatctnnnnnnacatcagatgtcggctcactccatagtt

SEQ ID NO: 1409 - DNA, 59 bp, synthetic construct
  source 1..59: mol_type = other DNA
cctacacgacgctcttccgatctnnnnnnacatcagaaatccctgagtgtatggcagag

SEQ ID NO: 1410 - DNA, 59 bp, synthetic construct
  source 1..59: mol_type = other DNA
cctacacgacgctcttccgatctnnnnnnacatcacctgccctggtgagtcttatattt

SEQ ID NO: 1411 - DNA, 59 bp, synthetic construct
  source 1..59: mol_type = other DNA
cctacacgacgctcttccgatctnnnnnnacatcacggagacagaggaagagtagaaga

SEQ ID NO: 1412 - DNA, 59 bp, synthetic construct
  source 1..59: mol_type = other DNA
cctacacgacgctcttccgatctnnnnnnacatcactctctctctctttgtgtgtgtgt

SEQ ID NO: 1413 - DNA, 59 bp, synthetic construct
  source 1..59: mol_type = other DNA
cctacacgacgctcttccgatctnnnnnnacatcagctctcaggaaagtgacctaagtt

SEQ ID NO: 1414 - DNA, 59 bp, synthetic construct
  source 1..59: mol_type = other DNA
cctacacgacgctcttccgatctnnnnnnacatcagagcagcctatgaaggagaagaag

SEQ ID NO: 1415 - DNA, 59 bp, synthetic construct
  source 1..59: mol_type = other DNA
cctacacgacgctcttccgatctnnnnnnacatcactccaccatcaagtacaaggtctc

SEQ ID NO: 1416 - DNA, 55 bp, synthetic construct
  source 1..55: mol_type = other DNA
cctacacgacgctcttccgatctnnnnnnacatcaagggtcacacgccacataac

SEQ ID NO: 1417 - DNA, 58 bp, synthetic construct
  source 1..58: mol_type = other DNA
cctacacgacgctcttccgatctnnnnnnacatcagtctgtgggctctgtggtatatg

SEQ ID NO: 1418 - DNA, 58 bp, synthetic construct
  source 1..58: mol_type = other DNA
cctacacgacgctcttccgatctnnnnnnacatcactcgcccactcatcattcattca

SEQ ID NO: 1419 - DNA, 56 bp, synthetic construct
  source 1..56: mol_type = other DNA
cctacacgacgctcttccgatctnnnnnnacatcatcaccatcctcactgctgttc

SEQ ID NO: 1420 - DNA, 55 bp, synthetic construct
  source 1..55: mol_type = other DNA
cctacacgacgctcttccgatctnnnnnnacatcaatcaacagcgagcacatcca

SEQ ID NO: 1421 - DNA, 57 bp, synthetic construct
  source 1..57: mol_type = other DNA
cctacacgacgctcttccgatctnnnnnnacatcatgtggatgtccaacaagaggag

SEQ ID NO: 1422 - DNA, 59 bp, synthetic construct
  source 1..59: mol_type = other DNA
cctacacgacgctcttccgatctnnnnnnacatcagagaagagaagaacagggcatcag

SEQ ID NO: 1423 - DNA, 56 bp, synthetic construct
  source 1..56: mol_type = other DNA
cctacacgacgctcttccgatctnnnnnnacatcaagcgactgcatccgacataaa

SEQ ID NO: 1424 - DNA, 58 bp, synthetic construct
  source 1..58: mol_type = other DNA
cctacacgacgctcttccgatctnnnnnnacatcacaggtctctcaaccaggcatatt

SEQ ID NO: 1425 - DNA, 60 bp, synthetic construct
  source 1..60: mol_type = other DNA
cctacacgacgctcttccgatctnnnnnnacatcacagcagatgaggacagtgagaatta

SEQ ID NO: 1426 - DNA, 57 bp, synthetic construct
  source 1..57: mol_type = other DNA
cctacacgacgctcttccgatctnnnnnnacatcatccaatcttcgctcctccaatc

SEQ ID NO: 1427 - DNA, 59 bp, synthetic construct
  source 1..59: mol_type = other DNA
cctacacgacgctcttccgatctnnnnnnacatcacagtgaaactcacagaagcaacac

SEQ ID NO: 1428 - DNA, 59 bp, synthetic construct
  source 1..59: mol_type = other DNA
cctacacgacgctcttccgatctnnnnnnacatcacctatcgctcctactgctactact

SEQ ID NO: 1429 - DNA, 59 bp, synthetic construct
  source 1..59: mol_type = other DNA
cctacacgacgctcttccgatctnnnnnnacatcactccttcttacttcccagaatccc

SEQ ID NO: 1430 - DNA, 58 bp, synthetic construct
  source 1..58: mol_type = other DNA
cctacacgacgctcttccgatctnnnnnnacatcacctgcaagggagtgagttgatag

SEQ ID NO: 1431 - DNA, 59 bp, synthetic construct
  source 1..59: mol_type = other DNA
cctacacgacgctcttccgatctnnnnnnacatcacatatgagtcgggaccaaagagaa

SEQ ID NO: 1432 - DNA, 57 bp, synthetic construct
  source 1..57: mol_type = other DNA
cctacacgacgctcttccgatctnnnnnnacatcacagatcagggctgcttctagtt

SEQ ID NO: 1433 - DNA, 59 bp, synthetic construct
  source 1..59: mol_type = other DNA
cctacacgacgctcttccgatctnnnnnnacatcagaacctccttccagctactcaatc

SEQ ID NO: 1434 - DNA, 59 bp, synthetic construct
  source 1..59: mol_type = other DNA
cctacacgacgctcttccgatctnnnnnnacatcatccctctctctgactctcaaatct

SEQ ID NO: 1435 - DNA, 59 bp, synthetic construct
  source 1..59: mol_type = other DNA
cctacacgacgctcttccgatctnnnnnnacatcacctcagaacctctctgtactctca

SEQ ID NO: 1436 - DNA, 55 bp, synthetic construct
  source 1..55: mol_type = other DNA
cctacacgacgctcttccgatctnnnnnnacatcatgctcgtgccatctgacaat

SEQ ID NO: 1437 - DNA, 59 bp, synthetic construct
  source 1..59: mol_type = other DNA
cctacacgacgctcttccgatctnnnnnnacatcagtgagaggtaggcaaaggagatac

SEQ ID NO: 1438 - DNA, 57 bp, synthetic construct
  source 1..57: mol_type = other DNA
cctacacgacgctcttccgatctnnnnnnacatcagtgactcagcgagttccagaat

SEQ ID NO: 1439 - DNA, 56 bp, synthetic construct
  source 1..56: mol_type = other DNA
cctacacgacgctcttccgatctnnnnnnacatcaaagaagctgagcaaggtggag

SEQ ID NO: 1440 - DNA, 55 bp, synthetic construct
  source 1..55: mol_type = other DNA
cctacacgacgctcttccgatctnnnnnnacatcatctgcagcatggaccaaaga

SEQ ID NO: 1441 - DNA, 57 bp, synthetic construct
  source 1..57: mol_type = other DNA
cctacacgacgctcttccgatctnnnnnnacatcaccggtgacttccacaagaagat

SEQ ID NO: 1442 - DNA, 59 bp, synthetic construct
  source 1..59: mol_type = other DNA
cctacacgacgctcttccgatctnnnnnnacatcatggtccttgcagttgaccatataa

SEQ ID NO: 1443 - DNA, 56 bp, synthetic construct
  source 1..56: mol_type = other DNA
cctacacgacgctcttccgatctnnnnnnacatcatgtggacagagcaccaatacc

SEQ ID NO: 1444 - DNA, 58 bp, synthetic construct
  source 1..58: mol_type = other DNA
cctacacgacgctcttccgatctnnnnnnacatcagaacatcatccctgcctctactg

SEQ ID NO: 1445 - DNA, 59 bp, synthetic construct
  source 1..59: mol_type = other DNA
cctacacgacgctcttccgatctnnnnnnacatcagaacctcaatgtgacgggctatta

SEQ ID NO: 1446 - DNA, 57 bp, synthetic construct
  source 1..57: mol_type = other DNA
cctacacgacgctcttccgatctnnnnnnacatcaatctggtgtgtgaggacaactg

SEQ ID NO: 1447 - DNA, 57 bp, synthetic construct
  source 1..57: mol_type = other DNA
cctacacgacgctcttccgatctnnnnnnacatcaggcccgtatggaggaaacatta

SEQ ID NO: 1448 - DNA, 60 bp, synthetic construct
  source 1..60: mol_type = other DNA
cctacacgacgctcttccgatctnnnnnnacatcacacatacaggagacaccaaagaaga

SEQ ID NO: 1449 - DNA, 58 bp, synthetic construct
  source 1..58: mol_type = other DNA
cctacacgacgctcttccgatctnnnnnnacatcacttgtgacgggttgagaggatac

SEQ ID NO: 1450 - DNA, 57 bp, synthetic construct
  source 1..57: mol_type = other DNA
cctacacgacgctcttccgatctnnnnnnacatcagatggatgagcagtcacacaga

SEQ ID NO: 1451 - DNA, 59 bp, synthetic construct
  source 1..59: mol_type = other DNA
cctacacgacgctcttccgatctnnnnnnacatcagaaagagtgaagaaccgcctctaa

SEQ ID NO: 1452 - DNA, 60 bp, synthetic construct
  source 1..60: mol_type = other DNA
cctacacgacgctcttccgatctnnnnnnacatcagtactatccctgtaactgccaagag

SEQ ID NO: 1453 - DNA, 57 bp, synthetic construct
  source 1..57: mol_type = other DNA
cctacacgacgctcttccgatctnnnnnnacatcatggatccttgcagcagttagtt

SEQ ID NO: 1454 - DNA, 59 bp, synthetic construct
  source 1..59: mol_type = other DNA
cctacacgacgctcttccgatctnnnnnnacatcagaacacagggttccgtggtaataa

SEQ ID NO: 1455 - DNA, 60 bp, synthetic construct
  source 1..60: mol_type = other DNA
cctacacgacgctcttccgatctnnnnnnacatcaagaatagcagcctctcctcaattac

SEQ ID NO: 1456 - DNA, 59 bp, synthetic construct
  source 1..59: mol_type = other DNA
cctacacgacgctcttccgatctnnnnnnacatcaggttacatgatcccttgtcctgtc

SEQ ID NO: 1457 - DNA, 59 bp, synthetic construct
  source 1..59: mol_type = other DNA
cctacacgacgctcttccgatctnnnnnnacatcaccagagtgactgagagcacttaac

SEQ ID NO: 1458 - DNA, 57 bp, synthetic construct
  source 1..57: mol_type = other DNA
cctacacgacgctcttccgatctnnnnnnacatcaccctgaacactgatgcctactt

SEQ ID NO: 1459 - DNA, 59 bp, synthetic construct
  source 1..59: mol_type = other DNA
cctacacgacgctcttccgatctnnnnnnacatcacaaggctacgctatgctctatgaa

SEQ ID NO: 1460 - DNA, 59 bp, synthetic construct
  source 1..59: mol_type = other DNA
cctacacgacgctcttccgatctnnnnnnacatcactccactacagctctttccatgag

SEQ ID NO: 1461 - DNA, 57 bp, synthetic construct
  source 1..57: mol_type = other DNA
cctacacgacgctcttccgatctnnnnnnacatcacctctgtctgccctcacaatta

SEQ ID NO: 1462 - DNA, 61 bp, synthetic construct
  source 1..61: mol_type = other DNA
cctacacgacgctcttccgatctnnnnnnacatcactgtagtgctgtaggtctgtgtaaag

SEQ ID NO: 1463 - DNA, 57 bp, synthetic construct
  source 1..57: mol_type = other DNA
cctacacgacgctcttccgatctnnnnnnacatcatagcttcaccaggctcatcaaa

SEQ ID NO: 1464 - DNA, 58 bp, synthetic construct
  source 1..58: mol_type = other DNA
cctacacgacgctcttccgatctnnnnnnacatcacattgaagcagagctggagaaag

SEQ ID NO: 1465 - DNA, 58 bp, synthetic construct
  source 1..58: mol_type = other DNA
cctacacgacgctcttccgatctnnnnnnacatcaccataggtcctgcctcttcaatc

SEQ ID NO: 1466 - DNA, 60 bp, synthetic construct
  source 1..60: mol_type = other DNA
cctacacgacgctcttccgatctnnnnnnacatcactggtgatgctggtcatcttataca

SEQ ID NO: 1467 - DNA, 59 bp, synthetic construct
  source 1..59: mol_type = other DNA
cctacacgacgctcttccgatctnnnnnnacatcagggttccgagttcattactacagg

SEQ ID NO: 1468 - DNA, 59 bp, synthetic construct
  source 1..59: mol_type = other DNA
cctacacgacgctcttccgatctnnnnnnacatcatgcctagaggtgctcattcattta

SEQ ID NO: 1469 - DNA, 58 bp, synthetic construct
  source 1..58: mol_type = other DNA
cctacacgacgctcttccgatctnnnnnnacatcaccatgaggatgcttctgcatttg

SEQ ID NO: 1470 - DNA, 59 bp, synthetic construct
  source 1..59: mol_type = other DNA
cctacacgacgctcttccgatctnnnnnnacatcagtacatacctggctggattgagaa

SEQ ID NO: 1471 - DNA, 59 bp, synthetic construct
  source 1..59: mol_type = other DNA
cctacacgacgctcttccgatctnnnnnnacatcagatgatcccagtcactcctctcta

SEQ ID NO: 1472 - DNA, 58 bp, synthetic construct
  source 1..58: mol_type = other DNA
cctacacgacgctcttccgatctnnnnnnacatcagaagactgcatcaagagcaaacc

SEQ ID NO: 1473 - DNA, 60 bp, synthetic construct
  source 1..60: mol_type = other DNA
cctacacgacgctcttccgatctnnnnnnacatcatgtttgtcatcatccagacctactt

SEQ ID NO: 1474 - DNA, 59 bp, synthetic construct
  source 1..59: mol_type = other DNA
cctacacgacgctcttccgatctnnnnnnacatcagtcctgtcccactacatccataac

SEQ ID NO: 1475 - DNA, 59 bp, synthetic construct
  source 1..59: mol_type = other DNA
cctacacgacgctcttccgatctnnnnnnacatcaggagctgtagcctgagatgaatac

SEQ ID NO: 1476 - DNA, 58 bp, synthetic construct
  source 1..58: mol_type = other DNA
cctacacgacgctcttccgatctnnnnnnacatcatccagatgaacccaaggaaagtg

SEQ ID NO: 1477 - DNA, 58 bp, synthetic construct
  source 1..58: mol_type = other DNA
cctacacgacgctcttccgatctnnnnnnacatcaccttacgctatgtggtggtatcg

SEQ ID NO: 1478 - DNA, 59 bp, synthetic construct
  source 1..59: mol_type = other DNA
cctacacgacgctcttccgatctnnnnnnacatcacactgccctcgttcctctaataat

SEQ ID NO: 1479 - DNA, 59 bp, synthetic construct
  source 1..59: mol_type = other DNA
cctacacgacgctcttccgatctnnnnnnacatcaaaagctaggctctgagaaggaaac

SEQ ID NO: 1480 - DNA, 57 bp, synthetic construct
  source 1..57: mol_type = other DNA
cctacacgacgctcttccgatctnnnnnnacatcaccttcagaggcactcggtattt

SEQ ID NO: 1481 - DNA, 57 bp, synthetic construct
  source 1..57: mol_type = other DNA
cctacacgacgctcttccgatctnnnnnnacatcatcccgaagtgcacatggaatta

SEQ ID NO: 1482 - DNA, 59 bp, synthetic construct
  source 1..59: mol_type = other DNA
cctacacgacgctcttccgatctnnnnnnacatcactctgtccagtttgtgccagatag

SEQ ID NO: 1483 - DNA, 59 bp, synthetic construct
  source 1..59: mol_type = other DNA
cctacacgacgctcttccgatctnnnnnnacatcagtctgctcaggaaataaccttgga

SEQ ID NO: 1484 - DNA, 57 bp, synthetic construct
  source 1..57: mol_type = other DNA
cctacacgacgctcttccgatctnnnnnnacatcaacagtggtcagtcctttcttgg

SEQ ID NO: 1485 - DNA, 60 bp, synthetic construct
  source 1..60: mol_type = other DNA
cctacacgacgctcttccgatctnnnnnnacatcacaacttcctgagtagctgggattac

SEQ ID NO: 1486 - DNA, 57 bp, synthetic construct
  source 1..57: mol_type = other DNA
cctacacgacgctcttccgatctnnnnnnacatcatgtaccaccacacccaactaac

SEQ ID NO: 1487 - DNA, 58 bp, synthetic construct
  source 1..58: mol_type = other DNA
cctacacgacgctcttccgatctnnnnnnacatcacagggatctggcaacgagaaata

SEQ ID NO: 1488 - DNA, 58 bp, synthetic construct
  source 1..58: mol_type = other DNA
cctacacgacgctcttccgatctnnnnnnacatcaccatgtcctcctttctcctttgt

SEQ ID NO: 1489 - DNA, 58 bp, synthetic construct
  source 1..58: mol_type = other DNA
cctacacgacgctcttccgatctnnnnnnacatcacacaggcagcatttagcacatac

SEQ ID NO: 1490 - DNA, 58 bp, synthetic construct
  source 1..58: mol_type = other DNA
cctacacgacgctcttccgatctnnnnnnacatcagcagtggagagatgggacaatta

SEQ ID NO: 1491 - DNA, 59 bp, synthetic construct
  source 1..59: mol_type = other DNA
cctacacgacgctcttccgatctnnnnnnacatcaggagacaaggattaggagccatac

SEQ ID NO: 1492 - DNA, 58 bp, synthetic construct
  source 1..58: mol_type = other DNA
cctacacgacgctcttccgatctnnnnnnacatcacttccaaggtcaaaggacgaaga

SEQ ID NO: 1493 - DNA, 57 bp, synthetic construct
  source 1..57: mol_type = other DNA
cctacacgacgctcttccgatctnnnnnnacatcaccttgtgatgtggctggtagtt

SEQ ID NO: 1494 - DNA, 59 bp, synthetic construct
  source 1..59: mol_type = other DNA
cctacacgacgctcttccgatctnnnnnnacatcacctgtgcagggatgacatattcta

SEQ ID NO: 1495 - DNA, 57 bp, synthetic construct
  source 1..57: mol_type = other DNA
cctacacgacgctcttccgatctnnnnnnacatcaggatttccgagcacaggatgat

SEQ ID NO: 1496 - DNA, 59 bp, synthetic construct
  source 1..59: mol_type = other DNA
cctacacgacgctcttccgatctnnnnnnacatcatccaagaagacatacgagcagaag

SEQ ID NO: 1497 - DNA, 57 bp, synthetic construct
  source 1..57: mol_type = other DNA
cctacacgacgctcttccgatctnnnnnnacatcaactaggtctggagagacagcaa

SEQ ID NO: 1498 - DNA, 59 bp, synthetic construct
  source 1..59: mol_type = other DNA
cctacacgacgctcttccgatctnnnnnnacatcagtctcaggaaagtggacgtagaag

SEQ ID NO: 1499 - DNA, 58 bp, synthetic construct
  source 1..58: mol_type = other DNA
cctacacgacgctcttccgatctnnnnnnacatcacaaggtcaaggagaaggctacag

SEQ ID NO: 1500 - DNA, 59 bp, synthetic construct
  source 1..59: mol_type = other DNA
cctacacgacgctcttccgatctnnnnnnacatcattctgctctctgcccaatgataag

SEQ ID NO: 1501 - DNA, 55 bp, synthetic construct
  source 1..55: mol_type = other DNA
cctacacgacgctcttccgatctnnnnnnacatcactgtcagctcagcctccaaa

SEQ ID NO: 1502 - DNA, 57 bp, synthetic construct
  source 1..57: mol_type = other DNA
cctacacgacgctcttccgatctnnnnnnacatcagctaccaccaaggacacataca

SEQ ID NO: 1503 - DNA, 59 bp, synthetic construct
  source 1..59: mol_type = other DNA
cctacacgacgctcttccgatctnnnnnnacatcactagaagactgttgggatgcagac

SEQ ID NO: 1504 - DNA, 59 bp, synthetic construct
  source 1..59: mol_type = other DNA
cctacacgacgctcttccgatctnnnnnnacatcaccttatccaagatggaccagacac

SEQ ID NO: 1505 - DNA, 55 bp, synthetic construct
  source 1..55: mol_type = other DNA
cctacacgacgctcttccgatctnnnnnnacatcatggaacctcagctgcaacat

SEQ ID NO: 1506 - DNA, 59 bp, synthetic construct
  source 1..59: mol_type = other DNA
cctacacgacgctcttccgatctnnnnnnacatcatggttctggtcctgttcaaataca

SEQ ID NO: 1507 - DNA, 57 bp, synthetic construct
  source 1..57: mol_type = other DNA
cctacacgacgctcttccgatctnnnnnnacatcaatggcttacgtctccacctttc

SEQ ID NO: 1508 - DNA, 58 bp, synthetic construct
  source 1..58: mol_type = other DNA
cctacacgacgctcttccgatctnnnnnnacatcaccaacaagccatagtggagagaa

SEQ ID NO: 1509 - DNA, 60 bp, synthetic construct
  source 1..60: mol_type = other DNA
cctacacgacgctcttccgatctnnnnnnacatcagatggctacttaccctccaacatag

SEQ ID NO: 1510 - DNA, 56 bp, synthetic construct
  source 1..56: mol_type = other DNA
cctacacgacgctcttccgatctnnnnnnacatcagaaggaggaccagcaagtgaa

SEQ ID NO: 1511 - DNA, 58 bp, synthetic construct
  source 1..58: mol_type = other DNA
cctacacgacgctcttccgatctnnnnnnacatcagcagtcagtaaaccaaagccaag

SEQ ID NO: 1512 - DNA, 59 bp, synthetic construct
  source 1..59: mol_type = other DNA
cctacacgacgctcttccgatctnnnnnnacatcattaacacagggtccacttcctaac

SEQ ID NO: 1513 - DNA, 57 bp, synthetic construct
  source 1..57: mol_type = other DNA
cctacacgacgctcttccgatctnnnnnnacatcacggttcatccaacaagcaacag

SEQ ID NO: 1514 - DNA, 59 bp, synthetic construct
  source 1..59: mol_type = other DNA
cctacacgacgctcttccgatctnnnnnnacatcactaagggaagttagtgccttgtga

SEQ ID NO: 1515 - DNA, 59 bp, synthetic construct
  source 1..59: mol_type = other DNA
cctacacgacgctcttccgatctnnnnnnacatcacctgggcaagaagaagaagaaaga

SEQ ID NO: 1516 - DNA, 58 bp, synthetic construct
  source 1..58: mol_type = other DNA
cctacacgacgctcttccgatctnnnnnnacatcagactggctagtgtggaagcatag

SEQ ID NO: 1517 - DNA, 58 bp, synthetic construct
  source 1..58: mol_type = other DNA
cctacacgacgctcttccgatctnnnnnnacatcaaggtggaagaagagacccaaatc

SEQ ID NO: 1518 - DNA, 58 bp, synthetic construct
  source 1..58: mol_type = other DNA
cctacacgacgctcttccgatctnnnnnnacatcaacttagagaccaacagcctgaac

SEQ ID NO: 1519 - DNA, 60 bp, synthetic construct
  source 1..60: mol_type = other DNA
cctacacgacgctcttccgatctnnnnnnacatcactcttaacacccaccctacatacac

SEQ ID NO: 1520 - DNA, 57 bp, synthetic construct
  source 1..57: mol_type = other DNA
cctacacgacgctcttccgatctnnnnnnacatcaggacatagtggccatggatgaa

SEQ ID NO: 1521 - DNA, 56 bp, synthetic construct
  source 1..56: mol_type = other DNA
cctacacgacgctcttccgatctnnnnnnacatcatcagaagaggccatcaagcag

SEQ ID NO: 1522 - DNA, 58 bp, synthetic construct
  source 1..58: mol_type = other DNA
cctacacgacgctcttccgatctnnnnnnacatcatccactagttggaccaaggtttc

SEQ ID NO: 1523 - DNA, 57 bp, synthetic construct
  source 1..57: mol_type = other DNA
cctacacgacgctcttccgatctnnnnnnacatcaaaccctctttgagaacctgtgg

SEQ ID NO: 1524 - DNA, 57 bp, synthetic construct
  source 1..57: mol_type = other DNA
cctacacgacgctcttccgatctnnnnnnacatcagtggccatatgggaactgaaga

SEQ ID NO: 1525 - DNA, 58 bp, synthetic construct
  source 1..58: mol_type = other DNA
cctacacgacgctcttccgatctnnnnnnacatcagaagggaggcagtgatagtgatg

SEQ ID NO: 1526 - DNA, 60 bp, synthetic construct
  source 1..60: mol_type = other DNA
cctacacgacgctcttccgatctnnnnnnacatcagacatctcttcatcgaggactaacc

SEQ ID NO: 1527 - DNA, 57 bp, synthetic construct
  source 1..57: mol_type = other DNA
cctacacgacgctcttccgatctnnnnnnacatcatttctctgcgttctgctcctac

SEQ ID NO: 1528 - DNA, 57 bp, synthetic construct
  source 1..57: mol_type = other DNA
cctacacgacgctcttccgatctnnnnnnacatcaataagccacgaggtgcagtaag

SEQ ID NO: 1529 - DNA, 58 bp, synthetic construct
  source 1..58: mol_type = other DNA
cctacacgacgctcttccgatctnnnnnnacatcatggaagagtcactcaagctgaaa

SEQ ID NO: 1530 - DNA, 59 bp, synthetic construct
  source 1..59: mol_type = other DNA
cctacacgacgctcttccgatctnnnnnnacatcagaccaaaccagaaacctccaattc

SEQ ID NO: 1531 - DNA, 57 bp, synthetic construct
  source 1..57: mol_type = other DNA
cctacacgacgctcttccgatctnnnnnnacatcatgatggaagaagtggtgcgtag

SEQ ID NO: 1532 - DNA, 58 bp, synthetic construct
  source 1..58: mol_type = other DNA
cctacacgacgctcttccgatctnnnnnnacatcacttctcctgggtccaagcaatta

SEQ ID NO: 1533 - DNA, 59 bp, synthetic construct
  source 1..59: mol_type = other DNA
cctacacgacgctcttccgatctnnnnnnacatcagtgctggatgatagacgcagatag

SEQ ID NO: 1534 - DNA, 59 bp, synthetic construct
  source 1..59: mol_type = other DNA
cctacacgacgctcttccgatctnnnnnnacatcacacaagaggctggtctgaatatga

SEQ ID NO: 1535 - DNA, 57 bp, synthetic construct
  source 1..57: mol_type = other DNA
cctacacgacgctcttccgatctnnnnnnacatcagcctggagaggtctgaagaaac

SEQ ID NO: 1536 - DNA, 56 bp, synthetic construct
  source 1..56: mol_type = other DNA
cctacacgacgctcttccgatctnnnnnnacatcatgggaggaagccagaatcaac

SEQ ID NO: 1537 - DNA, 55 bp, synthetic construct
  source 1..55: mol_type = other DNA
cctacacgacgctcttccgatctnnnnnnacatcagggctgctgagtctgctaaa

SEQ ID NO: 1538 - DNA, 58 bp, synthetic construct
  source 1..58: mol_type = other DNA
cctacacgacgctcttccgatctnnnnnnacatcacacacaagttcaccagcagaaag

SEQ ID NO: 1539 - DNA, 57 bp, synthetic construct
  source 1..57: mol_type = other DNA
cctacacgacgctcttccgatctnnnnnnacatcataaccaagagctgtcgggaatg

SEQ ID NO: 1540 - DNA, 56 bp, synthetic construct
  source 1..56: mol_type = other DNA
cctacacgacgctcttccgatctnnnnnnacatcacctcccatcccaccacataaa

SEQ ID NO: 1541 - DNA, 59 bp, synthetic construct
  source 1..59: mol_type = other DNA
cctacacgacgctcttccgatctnnnnnnacatcaagctacctcagcaagacgttattt

SEQ ID NO: 1542 - DNA, 57 bp, synthetic construct
  source 1..57: mol_type = other DNA
cctacacgacgctcttccgatctnnnnnnacatcacctcattggtgtcactgctact

SEQ ID NO: 1543 - DNA, 59 bp, synthetic construct
  source 1..59: mol_type = other DNA
cctacacgacgctcttccgatctnnnnnnacatcaccaccatggacacctataaggaac

SEQ ID NO: 1544 - DNA, 58 bp, synthetic construct
  source 1..58: mol_type = other DNA
cctacacgacgctcttccgatctnnnnnnacatcacctgtggagatagagcctgtttg

SEQ ID NO: 1545 - DNA, 57 bp, synthetic construct
  source 1..57: mol_type = other DNA
cctacacgacgctcttccgatctnnnnnnacatcagggtgcaggattccatgaagta

SEQ ID NO: 1546 - DNA, 58 bp, synthetic construct
  source 1..58: mol_type = other DNA
cctacacgacgctcttccgatctnnnnnnacatcaggtcaaacagaggagagcatgaa

SEQ ID NO: 1547 - DNA, 58 bp, synthetic construct
  source 1..58: mol_type = other DNA
cctacacgacgctcttccgatctnnnnnnacatcagtctgctcttagctgtctccatt

SEQ ID NO: 1548 - DNA, 59 bp, synthetic construct
  source 1..59: mol_type = other DNA
cctacacgacgctcttccgatctnnnnnnacatcacctcctgtgttatggtctggaaag

SEQ ID NO: 1549 - DNA, 59 bp, synthetic construct
  source 1..59: mol_type = other DNA
cctacacgacgctcttccgatctnnnnnnacatcaccacgtctcggtgaagaatcatag

SEQ ID NO: 1550 - DNA, 64 bp, synthetic construct
  source 1..64: mol_type = other DNA
cctacacgacgctcttccgatctnnnnnnacatcatcaagagttccctatcactctctttaatc

SEQ ID NO: 1551 - DNA, 59 bp, synthetic construct
  source 1..59: mol_type = other DNA
cctacacgacgctcttccgatctnnnnnnacatcactgggtgagttctgggagtataga

SEQ ID NO: 1552 - DNA, 55 bp, synthetic construct
  source 1..55: mol_type = other DNA
cctacacgacgctcttccgatctnnnnnnacatcaaagtcaggcacgtagctcag

SEQ ID NO: 1553 - DNA, 57 bp, synthetic construct
  source 1..57: mol_type = other DNA
cctacacgacgctcttccgatctnnnnnnacatcagtcttcctagccctctgcaaat

SEQ ID NO: 1554 - DNA, 58 bp, synthetic construct
  source 1..58: mol_type = other DNA
cctacacgacgctcttccgatctnnnnnnacatcagagctgtggcatctgtctctaaa

SEQ ID NO: 1555 - DNA, 59 bp, synthetic construct
  source 1..59: mol_type = other DNA
cctacacgacgctcttccgatctnnnnnnacatcaggccaggatataactgacttcacc

SEQ ID NO: 1556 - DNA, 57 bp, synthetic construct
  source 1..57: mol_type = other DNA
cctacacgacgctcttccgatctnnnnnnacatcacctgaacagggagggatgattt

SEQ ID NO: 1557 - DNA, 58 bp, synthetic construct
  source 1..58: mol_type = other DNA
cctacacgacgctcttccgatctnnnnnnacatcagtcctatgtgtcctccaccaatc

SEQ ID NO: 1558 - DNA, 57 bp, synthetic construct
  source 1..57: mol_type = other DNA
cctacacgacgctcttccgatctnnnnnnacatcaggcacagacagatctggtacat

SEQ ID NO: 1559 - DNA, 56 bp, synthetic construct
  source 1..56: mol_type = other DNA
cctacacgacgctcttccgatctnnnnnnacatcatgggtgcttgccaaagagata

SEQ ID NO: 1560 - DNA, 58 bp, synthetic construct
  source 1..58: mol_type = other DNA
cctacacgacgctcttccgatctnnnnnnacatcacgatcacaggaaacctggagaat

SEQ ID NO: 1561 - DNA, 58 bp, synthetic construct
  source 1..58: mol_type = other DNA
cctacacgacgctcttccgatctnnnnnnacatcagtcaccagttgctcgagttagaa

SEQ ID NO: 1562 - DNA, 57 bp, synthetic construct
  source 1..57: mol_type = other DNA
cctacacgacgctcttccgatctnnnnnnacatcagtgtacacactgcgagctactt

SEQ ID NO: 1563 - DNA, 58 bp, synthetic construct
  source 1..58: mol_type = other DNA
cctacacgacgctcttccgatctnnnnnnacatcaggcctctgaagatggtgttctac

SEQ ID NO: 1564 - DNA, 57 bp, synthetic construct
  source 1..57: mol_type = other DNA
cctacacgacgctcttccgatctnnnnnnacatcacctgctgctttctctacctcaa

SEQ ID NO: 1565 - DNA, 58 bp, synthetic construct
  source 1..58: mol_type = other DNA
cctacacgacgctcttccgatctnnnnnnacatcagggacagctggaaaggacttaat

SEQ ID NO: 1566 - DNA, 59 bp, synthetic construct
  source 1..59: mol_type = other DNA
cctacacgacgctcttccgatctnnnnnnacatcaacagaaggagacagaaagcaagag

SEQ ID NO: 1567 - DNA, 58 bp, synthetic construct
  source 1..58: mol_type = other DNA
cctacacgacgctcttccgatctnnnnnnacatcacataaggtgctgtgccagaaatg

SEQ ID NO: 1568 - DNA, 60 bp, synthetic construct
  source 1..60: mol_type = other DNA
cctacacgacgctcttccgatctnnnnnnacatcaggatcatcagagaacaagcctatca

SEQ ID NO: 1569 - DNA, 59 bp, synthetic construct
  source 1..59: mol_type = other DNA
cctacacgacgctcttccgatctnnnnnnacatcagacgtgaagaagctggaaatgaag

SEQ ID NO: 1570 - DNA, 57 bp, synthetic construct
  source 1..57: mol_type = other DNA
cctacacgacgctcttccgatctnnnnnnacatcaggaaagcaagtccctggtagaa

SEQ ID NO: 1571 - DNA, 58 bp, synthetic construct
  source 1..58: mol_type = other DNA
cctacacgacgctcttccgatctnnnnnnacatcatccatcgttaagaacctgcagaa

SEQ ID NO: 1572 - DNA, 59 bp, synthetic construct
  source 1..59: mol_type = other DNA
cctacacgacgctcttccgatctnnnnnnacatcaggcctaagatgaaagcctctagtc

SEQ ID NO: 1573 - DNA, 59 bp, synthetic construct
  source 1..59: mol_type = other DNA
cctacacgacgctcttccgatctnnnnnnacatcactgaaagcagttagcaaggaaagg

SEQ ID NO: 1574 - DNA, 56 bp, synthetic construct
  source 1..56: mol_type = other DNA
cctacacgacgctcttccgatctnnnnnnacatcacaagtgtctgcagtgccaaat

SEQ ID NO: 1575 - DNA, 60 bp, synthetic construct
  source 1..60: mol_type = other DNA
cctacacgacgctcttccgatctnnnnnnacatcagagaggatggacaggatgaagtaag

SEQ ID NO: 1576 - DNA, 58 bp, synthetic construct
  source 1..58: mol_type = other DNA
cctacacgacgctcttccgatctnnnnnnacatcagcgcccagtagagatgtgatatt

SEQ ID NO: 1577 - DNA, 58 bp, synthetic construct
  source 1..58: mol_type = other DNA
cctacacgacgctcttccgatctnnnnnnacatcacagtgtgtggacctccatgttat

SEQ ID NO: 1578 - DNA, 58 bp, synthetic construct
  source 1..58: mol_type = other DNA
cctacacgacgctcttccgatctnnnnnnacatcaccagctgtccgaactcgaaataa

SEQ ID NO: 1579 - DNA, 59 bp, synthetic construct
  source 1..59: mol_type = other DNA
cctacacgacgctcttccgatctnnnnnnacatcactcaggaagatgcagaaaggatgg

SEQ ID NO: 1580 - DNA, 59 bp, synthetic construct
  source 1..59: mol_type = other DNA
cctacacgacgctcttccgatctnnnnnnacatcagtctgcacagagcaatgtgtaatg

SEQ ID NO: 1581 - DNA, 59 bp, synthetic construct
  source 1..59: mol_type = other DNA
cctacacgacgctcttccgatctnnnnnnacatcatgatgtgttgggagatgggtaaag

SEQ ID NO: 1582 - DNA, 59 bp, synthetic construct
  source 1..59: mol_type = other DNA
cctacacgacgctcttccgatctnnnnnnacatcatcctccctttctctgtacctctaa

SEQ ID NO: 1583 - DNA, 59 bp, synthetic construct
  source 1..59: mol_type = other DNA
cctacacgacgctcttccgatctnnnnnnacatcacccagtacatgaatgagggagaac

SEQ ID NO: 1584 - DNA, 57 bp, synthetic construct
  source 1..57: mol_type = other DNA
cctacacgacgctcttccgatctnnnnnnacatcagtgcacccagtgactgacatta

SEQ ID NO: 1585 - DNA, 60 bp, synthetic construct
  source 1..60: mol_type = other DNA
cctacacgacgctcttccgatctnnnnnnacatcacaaggattctgctagtccacgatac

SEQ ID NO: 1586 - DNA, 57 bp, synthetic construct
  source 1..57: mol_type = other DNA
cctacacgacgctcttccgatctnnnnnnacatcaccggctttgactgggtgtatta

SEQ ID NO: 1587 - DNA, 59 bp, synthetic construct
  source 1..59: mol_type = other DNA
cctacacgacgctcttccgatctnnnnnnacatcagccatagccagctcttcttcaata

SEQ ID NO: 1588 - DNA, 61 bp, synthetic construct
  source 1..61: mol_type = other DNA
cctacacgacgctcttccgatctnnnnnnacatcacagatgaggatgaggaagggaaatta

SEQ ID NO: 1589 - DNA, 59 bp, synthetic construct
  source 1..59: mol_type = other DNA
cctacacgacgctcttccgatctnnnnnnacatcaggcctagctgtataggaggaattg

SEQ ID NO: 1590 - DNA, 59 bp, synthetic construct
  source 1..59: mol_type = other DNA
cctacacgacgctcttccgatctnnnnnnacatcacacacacctcatcttctccatcaa

SEQ ID NO: 1591 - DNA, 59 bp, synthetic construct
  source 1..59: mol_type = other DNA
cctacacgacgctcttccgatctnnnnnnacatcagagcagaggaagacaagtgagaag

SEQ ID NO: 1592 - DNA, 59 bp, synthetic construct
  source 1..59: mol_type = other DNA
cctacacgacgctcttccgatctnnnnnnacatcaggcctctaccactatcttctctct

SEQ ID NO: 1593 - DNA, 59 bp, synthetic construct
  source 1..59: mol_type = other DNA
cctacacgacgctcttccgatctnnnnnnacatcagaccaacctgactttccactacag

SEQ ID NO: 1594 - DNA, 60 bp, synthetic construct
  source 1..60: mol_type = other DNA
cctacacgacgctcttccgatctnnnnnnacatcagttcacaaatgatgcagagacagag

SEQ ID NO: 1595 - DNA, 58 bp, synthetic construct
  source 1..58: mol_type = other DNA
cctacacgacgctcttccgatctnnnnnnacatcacagtcgcctccttcctattcatc

SEQ ID NO: 1596 - DNA, 59 bp, synthetic construct
  source 1..59: mol_type = other DNA
cctacacgacgctcttccgatctnnnnnnacatcagagcaggtcgaggactatttcttt

SEQ ID NO: 1597 - DNA, 59 bp, synthetic construct
  source 1..59: mol_type = other DNA
cctacacgacgctcttccgatctnnnnnnacatcacaaactgagtgaatcccagctaga

SEQ ID NO: 1598 - DNA, 59 bp, synthetic construct
  source 1..59: mol_type = other DNA
cctacacgacgctcttccgatctnnnnnnacatcagtaaagttcctcgtgactggagag

SEQ ID NO: 1599 - DNA, 59 bp, synthetic construct
  source 1..59: mol_type = other DNA
cctacacgacgctcttccgatctnnnnnnacatcagggatagaggaaagggatggtaag

SEQ ID NO: 1600 - DNA, 59 bp, synthetic construct
  source 1..59: mol_type = other DNA
cctacacgacgctcttccgatctnnnnnnacatcattcctcccttgggttctgatattg

SEQ ID NO: 1601 - DNA, 59 bp, synthetic construct
  source 1..59: mol_type = other DNA
cctacacgacgctcttccgatctnnnnnnacatcataggatggtgaagacctacgagaa

SEQ ID NO: 1602 - DNA, 57 bp, synthetic construct
  source 1..57: mol_type = other DNA
cctacacgacgctcttccgatctnnnnnnacatcaccaagagctgcagagagacatt

SEQ ID NO: 1603 - DNA, 58 bp, synthetic construct
  source 1..58: mol_type = other DNA
cctacacgacgctcttccgatctnnnnnnacatcaaagaaggagcacaaggaccatac

SEQ ID NO: 1604 - DNA, 58 bp, synthetic construct
  source 1..58: mol_type = other DNA
cctacacgacgctcttccgatctnnnnnnacatcactgtcactgtcttgtacccttgt

SEQ ID NO: 1605 - DNA, 59 bp, synthetic construct
  source 1..59: mol_type = other DNA
cctacacgacgctcttccgatctnnnnnnacatcaccaaggtgttctggaggtctatta

SEQ ID NO: 1606 - DNA, 59 bp, synthetic construct
  source 1..59: mol_type = other DNA
cctacacgacgctcttccgatctnnnnnnacatcagtcacaagtgagtctcccagatac

SEQ ID NO: 1607 - DNA, 60 bp, synthetic construct
  source 1..60: mol_type = other DNA
cctacacgacgctcttccgatctnnnnnnacatcactcagcctcccaagtaactgatatt

SEQ ID NO: 1608 - DNA, 59 bp, synthetic construct
  source 1..59: mol_type = other DNA
cctacacgacgctcttccgatctnnnnnnacatcatccctggacccagtaagaataaga

SEQ ID NO: 1609 - DNA, 59 bp, synthetic construct
  source 1..59: mol_type = other DNA
cctacacgacgctcttccgatctnnnnnnacatcaccgatgtctagagaacagcagaag

SEQ ID NO: 1610 - DNA, 57 bp, synthetic construct
  source 1..57: mol_type = other DNA
cctacacgacgctcttccgatctnnnnnnacatcacatctcagcaagcccagaagta

SEQ ID NO: 1611 - DNA, 56 bp, synthetic construct
  source 1..56: mol_type = other DNA
cctacacgacgctcttccgatctnnnnnnacatcaagcctgaccaacatggagaaa

SEQ ID NO: 1612 - DNA, 54 bp, synthetic construct
  source 1..54: mol_type = other DNA
gacgtgtgctcttccgatctnnnnnnatagttacagaaaggaaacccggtaaca

SEQ ID NO: 1613 - DNA, 56 bp, synthetic construct
  source 1..56: mol_type = other DNA
gacgtgtgctcttccgatctnnnnnnatagttgtacatggacaggcagacagatac

SEQ ID NO: 1614 - DNA, 56 bp, synthetic construct
  source 1..56: mol_type = other DNA
gacgtgtgctcttccgatctnnnnnnatagttcagtcagaacaggagatgcttagg

SEQ ID NO: 1615 - DNA, 55 bp, synthetic construct
  source 1..55: mol_type = other DNA
gacgtgtgctcttccgatctnnnnnnatagttctcatgcttcattccaggcaaac

SEQ ID NO: 1616 - DNA, 56 bp, synthetic construct
  source 1..56: mol_type = other DNA
gacgtgtgctcttccgatctnnnnnnatagttgtggtagaacaggtcatggaagat

SEQ ID NO: 1617 - DNA, 53 bp, synthetic construct
  source 1..53: mol_type = other DNA
gacgtgtgctcttccgatctnnnnnnatagttgcctgaccaaggaaagcaaag

SEQ ID NO: 1618 - DNA, 56 bp, synthetic construct
  source 1..56: mol_type = other DNA
gacgtgtgctcttccgatctnnnnnnatagttacatgacagttccctagccataag

SEQ ID NO: 1619 - DNA, 54 bp, synthetic construct
  source 1..54: mol_type = other DNA
gacgtgtgctcttccgatctnnnnnnatagttgagctgagcactccaggtattt

SEQ ID NO: 1620 - DNA, 56 bp, synthetic construct
  source 1..56: mol_type = other DNA
gacgtgtgctcttccgatctnnnnnnatagttccagcacagcagagttacctaaag

SEQ ID NO: 1621 - DNA, 56 bp, synthetic construct
  source 1..56: mol_type = other DNA
gacgtgtgctcttccgatctnnnnnnatagttggagcctcctatttgagacttgac

SEQ ID NO: 1622 - DNA, 56 bp, synthetic construct
  source 1..56: mol_type = other DNA
gacgtgtgctcttccgatctnnnnnnatagttgaagatctctgggcgtatgtagtt

SEQ ID NO: 1623 - DNA, 56 bp, synthetic construct
  source 1..56: mol_type = other DNA
gacgtgtgctcttccgatctnnnnnnatagtttgtgtcccgaaggaggtttattac

SEQ ID NO: 1624 - DNA, 54 bp, synthetic construct
  source 1..54: mol_type = other DNA
gacgtgtgctcttccgatctnnnnnnatagttcctcattcagctctcggaacat

SEQ ID NO: 1625 - DNA, 58 bp, synthetic construct
  source 1..58: mol_type = other DNA
gacgtgtgctcttccgatctnnnnnnatagttaataccaggctaagcactagaaagag

SEQ ID NO: 1626 - DNA, 55 bp, synthetic construct
  source 1..55: mol_type = other DNA
gacgtgtgctcttccgatctnnnnnnatagttgggttccagcaagatcaggatta

SEQ ID NO: 1627 - DNA, 57 bp, synthetic construct
  source 1..57: mol_type = other DNA
gacgtgtgctcttccgatctnnnnnnatagttccctctctccatcctccataaataa

SEQ ID NO: 1628 - DNA, 56 bp, synthetic construct
  source 1..56: mol_type = other DNA
gacgtgtgctcttccgatctnnnnnnatagttcctccagcatctcactgacataag

SEQ ID NO: 1629 - DNA, 53 bp, synthetic construct
  source 1..53: mol_type = other DNA
gacgtgtgctcttccgatctnnnnnnatagttttggtggtgggttgggataag

SEQ ID NO: 1630 - DNA, 54 bp, synthetic construct
  source 1..54: mol_type = other DNA
gacgtgtgctcttccgatctnnnnnnatagttcgacgaggtttcctccgtattt

SEQ ID NO: 1631 - DNA, 55 bp, synthetic construct
  source 1..55: mol_type = other DNA
gacgtgtgctcttccgatctnnnnnnatagttcagtcggaactctgacccataaa

SEQ ID NO: 1632 - DNA, 56 bp, synthetic construct
  source 1..56: mol_type = other DNA
gacgtgtgctcttccgatctnnnnnnatagttcacacatccctaggaaccagttta

SEQ ID NO: 1633 - DNA, 54 bp, synthetic construct
  source 1..54: mol_type = other DNA
gacgtgtgctcttccgatctnnnnnnatagtttaggagcatgccactgaagaag

SEQ ID NO: 1634 - DNA, 55 bp, synthetic construct
  source 1..55: mol_type = other DNA
gacgtgtgctcttccgatctnnnnnnatagttttgaaagtcacaggcagggatag

SEQ ID NO: 1635 - DNA, 58 bp, synthetic construct
  source 1..58: mol_type = other DNA
gacgtgtgctcttccgatctnnnnnnatagttctttccctccacaggaaacctatatt

SEQ ID NO: 1636 - DNA, 56 bp, synthetic construct
  source 1..56: mol_type = other DNA
gacgtgtgctcttccgatctnnnnnnatagttgcaaggaagagagaagggactaac

SEQ ID NO: 1637 - DNA, 53 bp, synthetic construct
  source 1..53: mol_type = other DNA
gacgtgtgctcttccgatctnnnnnnatagttacgtctctccgaagtctctgg

SEQ ID NO: 1638 - DNA, 55 bp, synthetic construct
  source 1..55: mol_type = other DNA
gacgtgtgctcttccgatctnnnnnnatagttagtccagtgaggcacaaattaga

SEQ ID NO: 1639 - DNA, 53 bp, synthetic construct
  source 1..53: mol_type = other DNA
gacgtgtgctcttccgatctnnnnnnatagttgttcccgtgttcactccttgt

SEQ ID NO: 1640 - DNA, 54 bp, synthetic construct
  source 1..54: mol_type = other DNA
gacgtgtgctcttccgatctnnnnnnatagttgtaaggaagccagccaagagaa

SEQ ID NO: 1641 - DNA, 57 bp, synthetic construct
  source 1..57: mol_type = other DNA
gacgtgtgctcttccgatctnnnnnnatagtttccaggtagcatatctctcccataa

SEQ ID NO: 1642 - DNA, 56 bp, synthetic construct
  source 1..56: mol_type = other DNA
gacgtgtgctcttccgatctnnnnnnatagttgatgacctattgtgggacctaacc

SEQ ID NO: 1643 - DNA, 56 bp, synthetic construct
  source 1..56: mol_type = other DNA
gacgtgtgctcttccgatctnnnnnnatagttccatcctgagtttctagctcttgt

SEQ ID NO: 1644 - DNA, 54 bp, synthetic construct
  source 1..54: mol_type = other DNA
gacgtgtgctcttccgatctnnnnnnatagtttaggtgctctcctccctaacat

SEQ ID NO: 1645 - DNA, 55 bp, synthetic construct
  source 1..55: mol_type = other DNA
gacgtgtgctcttccgatctnnnnnnatagtttggatttcctcttcgtggagttt

SEQ ID NO: 1646 - DNA, 57 bp, synthetic construct
  source 1..57: mol_type = other DNA
gacgtgtgctcttccgatctnnnnnnatagtttcactggataggctgggatagatag

SEQ ID NO: 1647 - DNA, 57 bp, synthetic construct
  source 1..57: mol_type = other DNA
gacgtgtgctcttccgatctnnnnnnatagttgaatcttgcactgctttggtttcta

SEQ ID NO: 1648 - DNA, 53 bp, synthetic construct
  source 1..53: mol_type = other DNA
gacgtgtgctcttccgatctnnnnnnatagttcctggcatggcagacataaga

SEQ ID NO: 1649 - DNA, 54 bp, synthetic construct
  source 1..54: mol_type = other DNA
gacgtgtgctcttccgatctnnnnnnatagttcagctctgccagcaaatgaaac

SEQ ID NO: 1650 - DNA, 57 bp, synthetic construct
  source 1..57: mol_type = other DNA
gacgtgtgctcttccgatctnnnnnnatagttcagcctatctcctgtcgcattatag

SEQ ID NO: 1651 - DNA, 54 bp, synthetic construct
  source 1..54: mol_type = other DNA
gacgtgtgctcttccgatctnnnnnnatagttcaacagctcgcaagacacattc

SEQ ID NO: 1652 - DNA, 54 bp, synthetic construct
  source 1..54: mol_type = other DNA
gacgtgtgctcttccgatctnnnnnnatagttcacagaagccatctcctgacaa

SEQ ID NO: 1653 - DNA, 57 bp, synthetic construct
  source 1..57: mol_type = other DNA
gacgtgtgctcttccgatctnnnnnnatagttgatctcggcatatacgtgcaaattc

SEQ ID NO: 1654 - DNA, 56 bp, synthetic construct
  source 1..56: mol_type = other DNA
gacgtgtgctcttccgatctnnnnnnatagttctccatcctagctcatctccaaag

SEQ ID NO: 1655 - DNA, 52 bp, synthetic construct
  source 1..52: mol_type = other DNA
gacgtgtgctcttccgatctnnnnnnatagttatattcacgcactcgcacca

SEQ ID NO: 1656 - DNA, 55 bp, synthetic construct
  source 1..55: mol_type = other DNA
gacgtgtgctcttccgatctnnnnnnatagttgggtgaccaggtctgagttaaag

SEQ ID NO: 1657 - DNA, 55 bp, synthetic construct
  source 1..55: mol_type = other DNA
gacgtgtgctcttccgatctnnnnnnatagttccaaagttcaccaccaacttgtc

SEQ ID NO: 1658 - DNA, 55 bp, synthetic construct
  source 1..55: mol_type = other DNA
gacgtgtgctcttccgatctnnnnnnatagttcttcaccagctccatgtcgatag

SEQ ID NO: 1659 - DNA, 56 bp, synthetic construct
  source 1..56: mol_type = other DNA
gacgtgtgctcttccgatctnnnnnnatagttgtcaggtcctgtctctgcaaataa

SEQ ID NO: 1660 - DNA, 53 bp, synthetic construct
  source 1..53: mol_type = other DNA
gacgtgtgctcttccgatctnnnnnnatagttatccacaccagcaagacagaa

SEQ ID NO: 1661 - DNA, 56 bp, synthetic construct
  source 1..56: mol_type = other DNA
gacgtgtgctcttccgatctnnnnnnatagttgtaggtcttctccagggcataaag

SEQ ID NO: 1662 - DNA, 56 bp, synthetic construct
  source 1..56: mol_type = other DNA
gacgtgtgctcttccgatctnnnnnnatagttcatcaccaggactgtagccaaata

SEQ ID NO: 1663 - DNA, 53 bp, synthetic construct
  source 1..53: mol_type = other DNA
gacgtgtgctcttccgatctnnnnnnatagtttgctgaggtcctgtgtgattc

SEQ ID NO: 1664 - DNA, 55 bp, synthetic construct
  source 1..55: mol_type = other DNA
gacgtgtgctcttccgatctnnnnnnatagttgggctttcagttactgggtagag

SEQ ID NO: 1665 - DNA, 55 bp, synthetic construct
  source 1..55: mol_type = other DNA
gacgtgtgctcttccgatctnnnnnnatagttgctggtgttgtgctaatgtaagg

SEQ ID NO: 1666 - DNA, 55 bp, synthetic construct
  source 1..55: mol_type = other DNA
gacgtgtgctcttccgatctnnnnnnatagttcaaagtcacacttggcctcattt

SEQ ID NO: 1667 - DNA, 56 bp, synthetic construct
  source 1..56: mol_type = other DNA
gacgtgtgctcttccgatctnnnnnnatagtttaggaacagagtccagagagaaca

SEQ ID NO: 1668 - DNA, 54 bp, synthetic construct
  source 1..54: mol_type = other DNA
gacgtgtgctcttccgatctnnnnnnatagttcagccaaccctccttcacaata

SEQ ID NO: 1669 - DNA, 56 bp, synthetic construct
  source 1..56: mol_type = other DNA
gacgtgtgctcttccgatctnnnnnnatagttgaaggaggcaggaagcagttatac

SEQ ID NO: 1670 - DNA, 56 bp, synthetic construct
  source 1..56: mol_type = other DNA
gacgtgtgctcttccgatctnnnnnnatagttaaagggaaagagcaccagagttag

SEQ ID NO: 1671 - DNA, 56 bp, synthetic construct
  source 1..56: mol_type = other DNA
gacgtgtgctcttccgatctnnnnnnatagttggagagtgtgctggattcacatag

SEQ ID NO: 1672 - DNA, 55 bp, synthetic construct
  source 1..55: mol_type = other DNA
gacgtgtgctcttccgatctnnnnnnatagttcactcttgtggcctgggtatatt

SEQ ID NO: 1673 - DNA, 55 bp, synthetic construct
  source 1..55: mol_type = other DNA
gacgtgtgctcttccgatctnnnnnnatagttaaatagggagtgtgggtgatgag

SEQ ID NO: 1674 - DNA, 55 bp, synthetic construct
  source 1..55: mol_type = other DNA
gacgtgtgctcttccgatctnnnnnnatagttcactacccaatccagggctattt

SEQ ID NO: 1675 - DNA, 55 bp, synthetic construct
  source 1..55: mol_type = other DNA
gacgtgtgctcttccgatctnnnnnnatagttgatcagcattccagtcggatgta

SEQ ID NO: 1676 - DNA, 55 bp, synthetic construct
  source 1..55: mol_type = other DNA
gacgtgtgctcttccgatctnnnnnnatagtttatcttgcctctcatccctctca

SEQ ID NO: 1677 - DNA, 55 bp, synthetic construct
  source 1..55: mol_type = other DNA
gacgtgtgctcttccgatctnnnnnnatagttccagatggaagacagaccttcaa

SEQ ID NO: 1678 - DNA, 55 bp, synthetic construct
  source 1..55: mol_type = other DNA
gacgtgtgctcttccgatctnnnnnnatagttgtgttggctacaagtcccataga

SEQ ID NO: 1679 - DNA, 56 bp, synthetic construct
  source 1..56: mol_type = other DNA
gacgtgtgctcttccgatctnnnnnnatagtttcatcactgttccaccgattagac

SEQ ID NO: 1680 - DNA, 54 bp, synthetic construct
  source 1..54: mol_type = other DNA
gacgtgtgctcttccgatctnnnnnnatagttctgtgtggaagaggctgaagat

SEQ ID NO: 1681 - DNA, 55 bp, synthetic construct
  source 1..55: mol_type = other DNA
gacgtgtgctcttccgatctnnnnnnatagttcgtttccattgtctgtccgtttg

SEQ ID NO: 1682 - DNA, 54 bp, synthetic construct
  source 1..54: mol_type = other DNA
gacgtgtgctcttccgatctnnnnnnatagttgacctcgaaacagcatctgact

SEQ ID NO: 1683 - DNA, 56 bp, synthetic construct
  source 1..56: mol_type = other DNA
gacgtgtgctcttccgatctnnnnnnatagttgagctgagaggatccacatgattc

SEQ ID NO: 1684 - DNA, 56 bp, synthetic construct
  source 1..56: mol_type = other DNA
gacgtgtgctcttccgatctnnnnnnatagttcagatgcactgagaaggcagataa

SEQ ID NO: 1685 - DNA, 56 bp, synthetic construct
  source 1..56: mol_type = other DNA
gacgtgtgctcttccgatctnnnnnnatagttggttgagagaagagagaagcagaa

SEQ ID NO: 1686 - DNA, 55 bp, synthetic construct
  source 1..55: mol_type = other DNA
gacgtgtgctcttccgatctnnnnnnatagttggcttagagacagcaacctactt

SEQ ID NO: 1687 - DNA, 57 bp, synthetic construct
  source 1..57: mol_type = other DNA
gacgtgtgctcttccgatctnnnnnnatagttccacatctgaacacagagaggtaag

SEQ ID NO: 1688 - DNA, 56 bp, synthetic construct
  source 1..56: mol_type = other DNA
gacgtgtgctcttccgatctnnnnnnatagttggagggaagaaactacaaggacaa

SEQ ID NO: 1689 - DNA, 53 bp, synthetic construct
  source 1..53: mol_type = other DNA
gacgtgtgctcttccgatctnnnnnnatagtttggtccacaccagcagataaa

SEQ ID NO: 1690 - DNA, 56 bp, synthetic construct
  source 1..56: mol_type = other DNA
gacgtgtgctcttccgatctnnnnnnatagttgtgagctctgactacttgggaatg

SEQ ID NO: 1691 - DNA, 54 bp, synthetic construct
  source 1..54: mol_type = other DNA
gacgtgtgctcttccgatctnnnnnnatagttcaatcccacctctctcctttga

SEQ ID NO: 1692 - DNA, 56 bp, synthetic construct
  source 1..56: mol_type = other DNA
gacgtgtgctcttccgatctnnnnnnatagttggagaagaagtccaaggcaaagag

SEQ ID NO: 1693 - DNA, 56 bp, synthetic construct
  source 1..56: mol_type = other DNA
gacgtgtgctcttccgatctnnnnnnatagttgactgaagagcaggaaagtcgtag

SEQ ID NO: 1694 - DNA, 55 bp, synthetic construct
  source 1..55: mol_type = other DNA
gacgtgtgctcttccgatctnnnnnnatagttgtcttcacccggattgactaaca

SEQ ID NO: 1695 - DNA, 56 bp, synthetic construct
  source 1..56: mol_type = other DNA
gacgtgtgctcttccgatctnnnnnnatagttctgcgggtgagacattagatagac

SEQ ID NO: 1696 - DNA, 56 bp, synthetic construct
  source 1..56: mol_type = other DNA
gacgtgtgctcttccgatctnnnnnnatagttgtggaggagaggtgacattgtaag

SEQ ID NO: 1697 - DNA, 57 bp, synthetic construct
  source 1..57: mol_type = other DNA
gacgtgtgctcttccgatctnnnnnnatagttgaccaatcaggagcaactcatctac

SEQ ID NO: 1698 - DNA, 57 bp, synthetic construct
  source 1..57: mol_type = other DNA
gacgtgtgctcttccgatctnnnnnnatagttagcagagtgcttggagtatagaaag

SEQ ID NO: 1699 - DNA, 56 bp, synthetic construct
  source 1..56: mol_type = other DNA
gacgtgtgctcttccgatctnnnnnnatagttcagtctctggatgatgcgttctac

SEQ ID NO: 1700 - DNA, 55 bp, synthetic construct
  source 1..55: mol_type = other DNA
gacgtgtgctcttccgatctnnnnnnatagttggaactagaaggcaagggcatag

SEQ ID NO: 1701 - DNA, 54 bp, synthetic construct
  source 1..54: mol_type = other DNA
gacgtgtgctcttccgatctnnnnnnatagttagcagagggaagtagagaagga

SEQ ID NO: 1702 - DNA, 57 bp, synthetic construct
  source 1..57: mol_type = other DNA
gacgtgtgctcttccgatctnnnnnnatagttggtttgccagagctactagagatac

SEQ ID NO: 1703 - DNA, 56 bp, synthetic construct
  source 1..56: mol_type = other DNA
gacgtgtgctcttccgatctnnnnnnatagttctcctgtccaaagtgatgatggaa

SEQ ID NO: 1704 - DNA, 53 bp, synthetic construct
  source 1..53: mol_type = other DNA
gacgtgtgctcttccgatctnnnnnnatagttgtcccagcccttccatgttta

SEQ ID NO: 1705 - DNA, 56 bp, synthetic construct
  source 1..56: mol_type = other DNA
gacgtgtgctcttccgatctnnnnnnatagttgaagtggcctttatgggaagtttg

SEQ ID NO: 1706 - DNA, 54 bp, synthetic construct
  source 1..54: mol_type = other DNA
gacgtgtgctcttccgatctnnnnnnatagttgtccagaatgcccaacaggata

SEQ ID NO: 1707 - DNA, 56 bp, synthetic construct
  source 1..56: mol_type = other DNA
gacgtgtgctcttccgatctnnnnnnatagttcgtggaaagagagaagagggaaac

SEQ ID NO: 1708 - DNA, 54 bp, synthetic construct
  source 1..54: mol_type = other DNA
gacgtgtgctcttccgatctnnnnnnatagttctctcttgcaggtgcaggtatt

SEQ ID NO: 1709 - DNA, 53 bp, synthetic construct
  source 1..53: mol_type = other DNA
gacgtgtgctcttccgatctnnnnnnatagttcaccgcgccagcatataattc

SEQ ID NO: 1710 - DNA, 54 bp, synthetic construct
  source 1..54: mol_type = other DNA
gacgtgtgctcttccgatctnnnnnnatagtttggagagagggagcagttagat

SEQ ID NO: 1711 - DNA, 55 bp, synthetic construct
  source 1..55: mol_type = other DNA
gacgtgtgctcttccgatctnnnnnnatagttaggaggagcacacagaggtatta

SEQ ID NO: 1712 - DNA, 54 bp, synthetic construct
  source 1..54: mol_type = other DNA
gacgtgtgctcttccgatctnnnnnnatagttatctgggtgcccttgacattag

SEQ ID NO: 1713 - DNA, 55 bp, synthetic construct
  source 1..55: mol_type = other DNA
gacgtgtgctcttccgatctnnnnnnatagtttggctgctgaactgtgactatac

SEQ ID NO: 1714 - DNA, 53 bp, synthetic construct
  source 1..53: mol_type = other DNA
gacgtgtgctcttccgatctnnnnnnatagttcacaggagcaggtgtcgtaaa

SEQ ID NO: 1715 - DNA, 54 bp, synthetic construct
  source 1..54: mol_type = other DNA
gacgtgtgctcttccgatctnnnnnnatagttggtcgatgaccttgagtgtgtt

SEQ ID NO: 1716 - DNA, 55 bp, synthetic construct
  source 1..55: mol_type = other DNA
gacgtgtgctcttccgatctnnnnnnatagttaggagaggagaaagggagaaaga

SEQ ID NO: 1717 - DNA, 56 bp, synthetic construct
  source 1..56: mol_type = other DNA
gacgtgtgctcttccgatctnnnnnnatagttctttgctctagatcctgccgaata

SEQ ID NO: 1718 - DNA, 56 bp, synthetic construct
  source 1..56: mol_type = other DNA
gacgtgtgctcttccgatctnnnnnnatagttccaaggttggagtcgttctcatag

SEQ ID NO: 1719 - DNA, 54 bp, synthetic construct
  source 1..54: mol_type = other DNA
gacgtgtgctcttccgatctnnnnnnatagttggtcagaagtcagaagccatga

SEQ ID NO: 1720 - DNA, 56 bp, synthetic construct
  source 1..56: mol_type = other DNA
gacgtgtgctcttccgatctnnnnnnatagttttagtgcctccatggcatacatag

SEQ ID NO: 1721 - DNA, 53 bp, synthetic construct
  source 1..53: mol_type = other DNA
gacgtgtgctcttccgatctnnnnnnatagttcagggaagccgatggtgtaat

SEQ ID NO: 1722 - DNA, 55 bp, synthetic construct
  source 1..55: mol_type = other DNA
gacgtgtgctcttccgatctnnnnnnatagttagaagagagcgagccagtttatc

SEQ ID NO: 1723 - DNA, 54 bp, synthetic construct
  source 1..54: mol_type = other DNA
gacgtgtgctcttccgatctnnnnnnatagtttgaggccagtgatagggtaagg

SEQ ID NO: 1724 - DNA, 54 bp, synthetic construct
  source 1..54: mol_type = other DNA
gacgtgtgctcttccgatctnnnnnnatagttaaacccacccagatgccttaat

SEQ ID NO: 1725 - DNA, 54 bp, synthetic construct
  source 1..54: mol_type = other DNA
gacgtgtgctcttccgatctnnnnnnatagttttgccagcttcctcacagatag

SEQ ID NO: 1726 - DNA, 54 bp, synthetic construct
  source 1..54: mol_type = other DNA
gacgtgtgctcttccgatctnnnnnnatagttctgctacaggcaggagaatgaa

SEQ ID NO: 1727 - DNA, 55 bp, synthetic construct
  source 1..55: mol_type = other DNA
gacgtgtgctcttccgatctnnnnnnatagttggtcatgctctgtttcaggatct

SEQ ID NO: 1728 - DNA, 58 bp, synthetic construct
  source 1..58: mol_type = other DNA
gacgtgtgctcttccgatctnnnnnnatagttttctgtcctccttactacctcacata

SEQ ID NO: 1729 - DNA, 56 bp, synthetic construct
  source 1..56: mol_type = other DNA
gacgtgtgctcttccgatctnnnnnnatagtttgtctccctcgatcactcctattt

SEQ ID NO: 1730 - DNA, 53 bp, synthetic construct
  source 1..53: mol_type = other DNA
gacgtgtgctcttccgatctnnnnnnatagttactctggttggcttccttcac

SEQ ID NO: 1731 - DNA, 54 bp, synthetic construct
  source 1..54: mol_type = other DNA
gacgtgtgctcttccgatctnnnnnnatagttttgggacatccctgccttattc

SEQ ID NO: 1732 - DNA, 56 bp, synthetic construct
  source 1..56: mol_type = other DNA
gacgtgtgctcttccgatctnnnnnnatagttggaggcaatcaggagtcactaaag

SEQ ID NO: 1733 - DNA, 55 bp, synthetic construct
  source 1..55: mol_type = other DNA
gacgtgtgctcttccgatctnnnnnnatagttctcacaaagatggctgaggaaga

SEQ ID NO: 1734 - DNA, 58 bp, synthetic construct
  source 1..58: mol_type = other DNA
gacgtgtgctcttccgatctnnnnnnatagttctggatgactggctactgttagatac

SEQ ID NO: 1735 - DNA, 56 bp, synthetic construct
  source 1..56: mol_type = other DNA
gacgtgtgctcttccgatctnnnnnnatagttgagtgggtagggaaagtccaaatc

SEQ ID NO: 1736 - DNA, 55 bp, synthetic construct
  source 1..55: mol_type = other DNA
gacgtgtgctcttccgatctnnnnnnatagttactcagtccatgagcgtgtaaag

SEQ ID NO: 1737 - DNA, 55 bp, synthetic construct
  source 1..55: mol_type = other DNA
gacgtgtgctcttccgatctnnnnnnatagtttactggcaacagaacaaggatca

SEQ ID NO: 1738 - DNA, 54 bp, synthetic construct
  source 1..54: mol_type = other DNA
gacgtgtgctcttccgatctnnnnnnatagttcagaaggtgacttgggcataga

SEQ ID NO: 1739 - DNA, 55 bp, synthetic construct
  source 1..55: mol_type = other DNA
gacgtgtgctcttccgatctnnnnnnatagttgcttgcctttctctgtctttgtg

SEQ ID NO: 1740 - DNA, 56 bp, synthetic construct
  source 1..56: mol_type = other DNA
gacgtgtgctcttccgatctnnnnnnatagttgtagtagccagggttcttgtagtc

SEQ ID NO: 1741 - DNA, 57 bp, synthetic construct
  source 1..57: mol_type = other DNA
gacgtgtgctcttccgatctnnnnnnatagttcagcacaaacacacactcacataaa

SEQ ID NO: 1742 - DNA, 55 bp, synthetic construct
  source 1..55: mol_type = other DNA
gacgtgtgctcttccgatctnnnnnnatagtttctgcttctctcaatgtgactgg

SEQ ID NO: 1743 - DNA, 55 bp, synthetic construct
  source 1..55: mol_type = other DNA
gacgtgtgctcttccgatctnnnnnnatagttgtgacctatggtgttcccagaaa

SEQ ID NO: 1744 - DNA, 57 bp, synthetic construct
  source 1..57: mol_type = other DNA
gacgtgtgctcttccgatctnnnnnnatagttgttacaacgagcaactgaccaaatc

SEQ ID NO: 1745 - DNA, 56 bp, synthetic construct
  source 1..56: mol_type = other DNA
gacgtgtgctcttccgatctnnnnnnatagttcatgcctagtcagacctccataac

SEQ ID NO: 1746 - DNA, 52 bp, synthetic construct
  source 1..52: mol_type = other DNA
gacgtgtgctcttccgatctnnnnnnatagtttgtggccgattgctacaaga

SEQ ID NO: 1747 - DNA, 54 bp, synthetic construct
  source 1..54: mol_type = other DNA
gacgtgtgctcttccgatctnnnnnnatagttaacagtagcgagagtggttgtg

SEQ ID NO: 1748 - DNA, 56 bp, synthetic construct
  source 1..56: mol_type = other DNA
gacgtgtgctcttccgatctnnnnnnatagttgagtgacagtcagacaggcataaa

SEQ ID NO: 1749 - DNA, 55 bp, synthetic construct
  source 1..55: mol_type = other DNA
gacgtgtgctcttccgatctnnnnnnatagttctacccaggaccacacactttag

SEQ ID NO: 1750 - DNA, 53 bp, synthetic construct
  source 1..53: mol_type = other DNA
gacgtgtgctcttccgatctnnnnnnatagttggcacacctggaagcaaattc

SEQ ID NO: 1751 - DNA, 54 bp, synthetic construct
  source 1..54: mol_type = other DNA
gacgtgtgctcttccgatctnnnnnnatagttcatggctctgtccctgagttta

SEQ ID NO: 1752 - DNA, 54 bp, synthetic construct
  source 1..54: mol_type = other DNA
gacgtgtgctcttccgatctnnnnnnatagttgattggttcctcagccctaaca

SEQ ID NO: 1753 - DNA, 54 bp, synthetic construct
  source 1..54: mol_type = other DNA
gacgtgtgctcttccgatctnnnnnnatagttaaagcagggtaagggagaaaca

SEQ ID NO: 1754 - DNA, 54 bp, synthetic construct
  source 1..54: mol_type = other DNA
gacgtgtgctcttccgatctnnnnnnatagttccatggaatcctgaacccactt

SEQ ID NO: 1755 - DNA, 56 bp, synthetic construct
  source 1..56: mol_type = other DNA
gacgtgtgctcttccgatctnnnnnnatagttcaaggttagtctctccctctgttc

SEQ ID NO: 1756 - DNA, 56 bp, synthetic construct
  source 1..56: mol_type = other DNA
gacgtgtgctcttccgatctnnnnnnatagttcgtcaaggtacagcatcgagatag

SEQ ID NO: 1757 - DNA, 56 bp, synthetic construct
  source 1..56: mol_type = other DNA
gacgtgtgctcttccgatctnnnnnnatagttgtacaagtggaacaggcggataag

SEQ ID NO: 1758 - DNA, 57 bp, synthetic construct
  source 1..57: mol_type = other DNA
gacgtgtgctcttccgatctnnnnnnatagttctacccttcctgggagttaaagaag

SEQ ID NO: 1759 - DNA, 54 bp, synthetic construct
  source 1..54: mol_type = other DNA
gacgtgtgctcttccgatctnnnnnnatagttggcacctgacacagaagaagat

SEQ ID NO: 1760 - DNA, 57 bp, synthetic construct
  source 1..57: mol_type = other DNA
gacgtgtgctcttccgatctnnnnnnatagttgacgggagaagacttgggtaataaa

SEQ ID NO: 1761 - DNA, 56 bp, synthetic construct
  source 1..56: mol_type = other DNA
gacgtgtgctcttccgatctnnnnnnatagttcctcagtctcacatccacacattc

SEQ ID NO: 1762 - DNA, 56 bp, synthetic construct
  source 1..56: mol_type = other DNA
gacgtgtgctcttccgatctnnnnnnatagttgtccatcctcctttccttgatctt

SEQ ID NO: 1763 - DNA, 54 bp, synthetic construct
  source 1..54: mol_type = other DNA
gacgtgtgctcttccgatctnnnnnnatagttggtgatggtaggagcacagaaa

SEQ ID NO: 1764 - DNA, 54 bp, synthetic construct
  source 1..54: mol_type = other DNA
gacgtgtgctcttccgatctnnnnnnatagttcatggtctgtgggtgcagaata

SEQ ID NO: 1765 - DNA, 54 bp, synthetic construct
  source 1..54: mol_type = other DNA
gacgtgtgctcttccgatctnnnnnnatagttggctggtcacaggatacaagaa

SEQ ID NO: 1766 - DNA, 56 bp, synthetic construct
  source 1..56: mol_type = other DNA
gacgtgtgctcttccgatctnnnnnnatagttccagaagatggtgtagtgggtaag

SEQ ID NO: 1767 - DNA, 54 bp, synthetic construct
  source 1..54: mol_type = other DNA
gacgtgtgctcttccgatctnnnnnnatagttacagctcagggatgttggtatg

SEQ ID NO: 1768 - DNA, 54 bp, synthetic construct
  source 1..54: mol_type = other DNA
gacgtgtgctcttccgatctnnnnnnatagtttcataagggtgggtccaaagac

SEQ ID NO: 1769 - DNA, 56 bp, synthetic construct
  source 1..56: mol_type = other DNA
gacgtgtgctcttccgatctnnnnnnatagttcctcccaaagtgctgggattatag

SEQ ID NO: 1770 - DNA, 55 bp, synthetic construct
  source 1..55: mol_type = other DNA
gacgtgtgctcttccgatctnnnnnnatagttctctctccaacaaaggcgtagat

SEQ ID NO: 1771 - DNA, 56 bp, synthetic construct
  source 1..56: mol_type = other DNA
gacgtgtgctcttccgatctnnnnnnatagttccctggagactaagctgtaattgg

SEQ ID NO: 1772 - DNA, 55 bp, synthetic construct
  source 1..55: mol_type = other DNA
gacgtgtgctcttccgatctnnnnnnatagttcttgattcctgggcagtcagtat

SEQ ID NO: 1773 - DNA, 56 bp, synthetic construct
  source 1..56: mol_type = other DNA
gacgtgtgctcttccgatctnnnnnnatagttgtgactcaagagaagccagtaacc

SEQ ID NO: 1774 - DNA, 56 bp, synthetic construct
  source 1..56: mol_type = other DNA
gacgtgtgctcttccgatctnnnnnnatagtttttcataggtggtgagagcagttt

SEQ ID NO: 1775 - DNA, 56 bp, synthetic construct
  source 1..56: mol_type = other DNA
gacgtgtgctcttccgatctnnnnnnatagtttaggtgtatcctgtgcaacaaaga

SEQ ID NO: 1776 - DNA, 54 bp, synthetic construct
  source 1..54: mol_type = other DNA
gacgtgtgctcttccgatctnnnnnnatagttagtgtctttcacagcccagaag

SEQ ID NO: 1777 - DNA, 53 bp, synthetic construct
  source 1..53: mol_type = other DNA
gacgtgtgctcttccgatctnnnnnnatagttcaacctgcttcctcccagaat

SEQ ID NO: 1778 - DNA, 56 bp, synthetic construct
  source 1..56: mol_type = other DNA
gacgtgtgctcttccgatctnnnnnnatagttggtaagcacagtccctttgtagat

SEQ ID NO: 1779 - DNA, 55 bp, synthetic construct
  source 1..55: mol_type = other DNA
gacgtgtgctcttccgatctnnnnnnatagttgttcgcaggtggatgttgtaaag

SEQ ID NO: 1780 - DNA, 55 bp, synthetic construct
  source 1..55: mol_type = other DNA
gacgtgtgctcttccgatctnnnnnnatagttgtcatggtctgtgttccacattg

SEQ ID NO: 1781 - DNA, 56 bp, synthetic construct
  source 1..56: mol_type = other DNA
gacgtgtgctcttccgatctnnnnnnatagttcctcagtagttgggttggaaagag

SEQ ID NO: 1782 - DNA, 56 bp, synthetic construct
  source 1..56: mol_type = other DNA
gacgtgtgctcttccgatctnnnnnnatagttcctggtacactcttgaccacatag

SEQ ID NO: 1783 - DNA, 56 bp, synthetic construct
  source 1..56: mol_type = other DNA
gacgtgtgctcttccgatctnnnnnnatagttccaggtaggaggatcaggagaata

SEQ ID NO: 1784 - DNA, 55 bp, synthetic construct
  source 1..55: mol_type = other DNA
gacgtgtgctcttccgatctnnnnnnatagttcacactgggaaagccatctctaa

SEQ ID NO: 1785 - DNA, 57 bp, synthetic construct
  source 1..57: mol_type = other DNA
gacgtgtgctcttccgatctnnnnnnatagttttaccagataggatttggctgagtc

SEQ ID NO: 1786 - DNA, 54 bp, synthetic construct
  source 1..54: mol_type = other DNA
gacgtgtgctcttccgatctnnnnnnatagttgtttcaccgatggctcaggata

SEQ ID NO: 1787 - DNA, 56 bp, synthetic construct
  source 1..56: mol_type = other DNA
gacgtgtgctcttccgatctnnnnnnatagttttccttggatgggtacagactttc

SEQ ID NO: 1788 - DNA, 56 bp, synthetic construct
  source 1..56: mol_type = other DNA
gacgtgtgctcttccgatctnnnnnnatagttctcagttcagttccaggtcataca

SEQ ID NO: 1789 - DNA, 55 bp, synthetic construct
  source 1..55: mol_type = other DNA
gacgtgtgctcttccgatctnnnnnnatagtttcatcttgggcagtcacatacaa

SEQ ID NO: 1790 - DNA, 55 bp, synthetic construct
  source 1..55: mol_type = other DNA
gacgtgtgctcttccgatctnnnnnnatagttctgccaaggacaaacacaatcag

SEQ ID NO: 1791 - DNA, 59 bp, synthetic construct
  source 1..59: mol_type = other DNA
gacgtgtgctcttccgatctnnnnnnatagttgcgtatctttggacaccatagtttaat

SEQ ID NO: 1792 - DNA, 56 bp, synthetic construct
  source 1..56: mol_type = other DNA
gacgtgtgctcttccgatctnnnnnnatagttgtcagagtcctggtgagatgaaac

SEQ ID NO: 1793 - DNA, 53 bp, synthetic construct
  source 1..53: mol_type = other DNA
gacgtgtgctcttccgatctnnnnnnatagttccgggtgtcctcaccaataaa

SEQ ID NO: 1794 - DNA, 54 bp, synthetic construct
  source 1..54: mol_type = other DNA
gacgtgtgctcttccgatctnnnnnnatagttccaccctttgtgttcccaattc

SEQ ID NO: 1795 - DNA, 54 bp, synthetic construct
  source 1..54: mol_type = other DNA
gacgtgtgctcttccgatctnnnnnnatagttgccactactccttagcgtgaaa

SEQ ID NO: 1796 - DNA, 56 bp, synthetic construct
  source 1..56: mol_type = other DNA
gacgtgtgctcttccgatctnnnnnnatagttgttcaccacgagagtcacatagaa

SEQ ID NO: 1797 - DNA, 54 bp, synthetic construct
  source 1..54: mol_type = other DNA
gacgtgtgctcttccgatctnnnnnnatagttatctgaggaggcacagaagttg

SEQ ID NO: 1798 - DNA, 55 bp, synthetic construct
  source 1..55: mol_type = other DNA
gacgtgtgctcttccgatctnnnnnnatagttgcagactgacccaacctcttaat

SEQ ID NO: 1799 - DNA, 56 bp, synthetic construct
  source 1..56: mol_type = other DNA
gacgtgtgctcttccgatctnnnnnnatagttctccttgatgattcccaggagttt

SEQ ID NO: 1800 - DNA, 54 bp, synthetic construct
  source 1..54: mol_type = other DNA
gacgtgtgctcttccgatctnnnnnnatagttgcatagcctccttcttgcatct

SEQ ID NO: 1801 - DNA, 56 bp, synthetic construct
  source 1..56: mol_type = other DNA
gacgtgtgctcttccgatctnnnnnnatagttccctacaacagacccacacaatac

SEQ ID NO: 1802 - DNA, 53 bp, synthetic construct
  source 1..53: mol_type = other DNA
gacgtgtgctcttccgatctnnnnnnatagttagtatcatgggtggccctttc

SEQ ID NO: 1803 - DNA, 53 bp, synthetic construct
  source 1..53: mol_type = other DNA
gacgtgtgctcttccgatctnnnnnnatagttagcaggcacgaggactttatt

SEQ ID NO: 1804 - DNA, 53 bp, synthetic construct
  source 1..53: mol_type = other DNA
gacgtgtgctcttccgatctnnnnnnatagttaagagcagcaggtccgaatag

SEQ ID NO: 1805 - DNA, 56 bp, synthetic construct
  source 1..56: mol_type = other DNA
gacgtgtgctcttccgatctnnnnnnatagtttcctccttggtttgcttctcatag

SEQ ID NO: 1806 - DNA, 55 bp, synthetic construct
  source 1..55: mol_type = other DNA
gacgtgtgctcttccgatctnnnnnnatagttgcaagggtacatgagagccatta

SEQ ID NO: 1807 - DNA, 56 bp, synthetic construct
  source 1..56: mol_type = other DNA
gacgtgtgctcttccgatctnnnnnnatagtttacagtcctaccacgagacataca

SEQ ID NO: 1808 - DNA, 54 bp, synthetic construct
  source 1..54: mol_type = other DNA
gacgtgtgctcttccgatctnnnnnnatagtttccagaaggcaggaatgaagac

SEQ ID NO: 1809 - DNA, 52 bp, synthetic construct
  source 1..52: mol_type = other DNA
gacgtgtgctcttccgatctnnnnnnatagtttcagtgggctggacagtgat

SEQ ID NO: 1810 - DNA, 57 bp, synthetic construct
  source 1..57: mol_type = other DNA
gacgtgtgctcttccgatctnnnnnnatagttccaacatgtaacaccaagcataacc

SEQ ID NO: 1811 - DNA, 55 bp, synthetic construct
  source 1..55: mol_type = other DNA
gacgtgtgctcttccgatctnnnnnnatagttgtttgctacaacatgggctacag

SEQ ID NO: 1812 - DNA, 56 bp, synthetic construct
  source 1..56: mol_type = other DNA
gacgtgtgctcttccgatctnnnnnnatagttgggtccgaataaatatgggaaggg

SEQ ID NO: 1813 - DNA, 55 bp, synthetic construct
  source 1..55: mol_type = other DNA
gacgtgtgctcttccgatctnnnnnnatagttcaacagggatggactgtcatgta

SEQ ID NO: 1814 - DNA, 56 bp, synthetic construct
  source 1..56: mol_type = other DNA
gacgtgtgctcttccgatctnnnnnnatagttgtattggtgattatgtcgccgttg

SEQ ID NO: 1815 - DNA, 56 bp, synthetic construct
  source 1..56: mol_type = other DNA
gacgtgtgctcttccgatctnnnnnnatagttagcccacaatgggagagtaataag

SEQ ID NO: 1816 - DNA, 56 bp, synthetic construct
  source 1..56: mol_type = other DNA
gacgtgtgctcttccgatctnnnnnnatagttcctgcgtagaagttgatgttgaag

SEQ ID NO: 1817 - DNA, 55 bp, synthetic construct
  source 1..55: mol_type = other DNA
gacgtgtgctcttccgatctnnnnnnatagttggtgaacgaacagtagggaaaga

SEQ ID NO: 1818 - DNA, 54 bp, synthetic construct
  source 1..54: mol_type = other DNA
gacgtgtgctcttccgatctnnnnnnatagttagggcagagactgtaggtagtt

SEQ ID NO: 1819 - DNA, 56 bp, synthetic construct
  source 1..56: mol_type = other DNA
gacgtgtgctcttccgatctnnnnnnatagttctcttctccctcctcctccttatt

SEQ ID NO: 1820 - DNA, 57 bp, synthetic construct
  source 1..57: mol_type = other DNA
gacgtgtgctcttccgatctnnnnnnatagttgtcgaggatgtaccgaatttgtttg

SEQ ID NO: 1821 - DNA, 52 bp, synthetic construct
  source 1..52: mol_type = other DNA
gacgtgtgctcttccgatctnnnnnnatagtttgtgtggagacaaccaagca

SEQ ID NO: 1822 - DNA, 55 bp, synthetic construct
  source 1..55: mol_type = other DNA
gacgtgtgctcttccgatctnnnnnnatagttcagctcatagatggtggcataca

SEQ ID NO: 1823 - DNA, 55 bp, synthetic construct
  source 1..55: mol_type = other DNA
gacgtgtgctcttccgatctnnnnnnatagttcagaatggagcaggagtgagaaa

SEQ ID NO: 1824 - DNA, 55 bp, synthetic construct
  source 1..55: mol_type = other DNA
gacgtgtgctcttccgatctnnnnnnatagttcaggacaagaggacaaggcatag

SEQ ID NO: 1825 - DNA, 54 bp, synthetic construct
  source 1..54: mol_type = other DNA
gacgtgtgctcttccgatctnnnnnnatagttgggtcccaagtgacagtgtaat

SEQ ID NO: 1826 - DNA, 55 bp, synthetic construct
  source 1..55: mol_type = other DNA
gacgtgtgctcttccgatctnnnnnnatagttcctcatctacacacacgcaagaa

SEQ ID NO: 1827 - DNA, 56 bp, synthetic construct
  source 1..56: mol_type = other DNA
gacgtgtgctcttccgatctnnnnnnatagttgggttcaagtgattctcccatctc

SEQ ID NO: 1828 - DNA, 54 bp, synthetic construct
  source 1..54: mol_type = other DNA
gacgtgtgctcttccgatctnnnnnnatagttccgttgaagtagagggcattca

SEQ ID NO: 1829 - DNA, 56 bp, synthetic construct
  source 1..56: mol_type = other DNA
gacgtgtgctcttccgatctnnnnnnatagttggacgcctggataaccctttattt

SEQ ID NO: 1830 - DNA, 55 bp, synthetic construct
  source 1..55: mol_type = other DNA
gacgtgtgctcttccgatctnnnnnnatagttcttggtggagtgtgaaaccagta

SEQ ID NO: 1831 - DNA, 57 bp, synthetic construct
  source 1..57: mol_type = other DNA
gacgtgtgctcttccgatctnnnnnnatagttctccactgccagagatcttgaatag

SEQ ID NO: 1832 - DNA, 55 bp, synthetic construct
  source 1..55: mol_type = other DNA
gacgtgtgctcttccgatctnnnnnnatagttggtgggtggtagaagaacaaaga

SEQ ID NO: 1833 - DNA, 56 bp, synthetic construct
  source 1..56: mol_type = other DNA
gacgtgtgctcttccgatctnnnnnnatagtttctctgaagagtgaaggaggagaa

SEQ ID NO: 1834 - DNA, 56 bp, synthetic construct
  source 1..56: mol_type = other DNA
gacgtgtgctcttccgatctnnnnnnatagttcagcgtaaagacccagaagtagag

SEQ ID NO: 1835 - DNA, 56 bp, synthetic construct
  source 1..56: mol_type = other DNA
gacgtgtgctcttccgatctnnnnnnatagttggacagtgtgcaggtagagttaat

SEQ ID NO: 1836 - DNA, 55 bp, synthetic construct
  source 1..55: mol_type = other DNA
gacgtgtgctcttccgatctnnnnnnatagttccaccgttggtagcgatacatta

SEQ ID NO: 1837 - DNA, 55 bp, synthetic construct
  source 1..55: mol_type = other DNA
gacgtgtgctcttccgatctnnnnnnatagttcagtcgatacactggaagccaaa

SEQ ID NO: 1838 - DNA, 56 bp, synthetic construct
  source 1..56: mol_type = other DNA
gacgtgtgctcttccgatctnnnnnnatagttgtgtctcaaactccttcctgtctc

SEQ ID NO: 1839 - DNA, 56 bp, synthetic construct
  source 1..56: mol_type = other DNA
gacgtgtgctcttccgatctnnnnnnatagttctcagtagcttgcatgtcctaact

SEQ ID NO: 1840 - DNA, 55 bp, synthetic construct
  source 1..55: mol_type = other DNA
gacgtgtgctcttccgatctnnnnnnatagttagattcctactcctcccttcctt

SEQ ID NO: 1841 - DNA, 56 bp, synthetic construct
  source 1..56: mol_type = other DNA
gacgtgtgctcttccgatctnnnnnnatagttctgatttcctctccagaccgtaac

SEQ ID NO: 1842 - DNA, 54 bp, synthetic construct
  source 1..54: mol_type = other DNA
gacgtgtgctcttccgatctnnnnnnatagttagtcccatggagctttctctct

SEQ ID NO: 1843 - DNA, 54 bp, synthetic construct
  source 1..54: mol_type = other DNA
gacgtgtgctcttccgatctnnnnnnatagttcaaaggagacaggcaggaatga

SEQ ID NO: 1844 - DNA, 53 bp, synthetic construct
  source 1..53: mol_type = other DNA
gacgtgtgctcttccgatctnnnnnnatagttctgctcctggactgtcacaaa

SEQ ID NO: 1845 - DNA, 57 bp, synthetic construct
  source 1..57: mol_type = other DNA
gacgtgtgctcttccgatctnnnnnnatagtttgacaattcatcctcccatctaacc

SEQ ID NO: 1846 - DNA, 55 bp, synthetic construct
  source 1..55: mol_type = other DNA
gacgtgtgctcttccgatctnnnnnnatagttctgttcttgcggagtagaaagga

SEQ ID NO: 1847 - DNA, 55 bp, synthetic construct
  source 1..55: mol_type = other DNA
gacgtgtgctcttccgatctnnnnnnatagttcgttgttggcagagtcaatgaag

SEQ ID NO: 1848 - DNA, 55 bp, synthetic construct
  source 1..55: mol_type = other DNA
gacgtgtgctcttccgatctnnnnnnatagttcctcttgagtagctgggattgag

SEQ ID NO: 1849 - DNA, 56 bp, synthetic construct
  source 1..56: mol_type = other DNA
gacgtgtgctcttccgatctnnnnnnatagttcagagaaggcaggagttgagtatg

SEQ ID NO: 1850 - DNA, 56 bp, synthetic construct
  source 1..56: mol_type = other DNA
gacgtgtgctcttccgatctnnnnnnatagttcttggattcctcagcctctatcac

SEQ ID NO: 1851 - DNA, 57 bp, synthetic construct
  source 1..57: mol_type = other DNA
gacgtgtgctcttccgatctnnnnnnatagttcagttcttgtaccaaagcccaaatc

SEQ ID NO: 1852 - DNA, 57 bp, synthetic construct
  source 1..57: mol_type = other DNA
gacgtgtgctcttccgatctnnnnnnatagttgcttcactctcttctccaaggtaaa

SEQ ID NO: 1853 - DNA, 56 bp, synthetic construct
  source 1..56: mol_type = other DNA
gacgtgtgctcttccgatctnnnnnnatagttctccttcctgcgagtatgtttgta

SEQ ID NO: 1854 - DNA, 54 bp, synthetic construct
  source 1..54: mol_type = other DNA
gacgtgtgctcttccgatctnnnnnnatagttgtggacggcaagaaacagaaag

SEQ ID NO: 1855 - DNA, 56 bp, synthetic construct
  source 1..56: mol_type = other DNA
gacgtgtgctcttccgatctnnnnnnatagtttgcatcagagtcaagtggtcatag

SEQ ID NO: 1856 - DNA, 57 bp, synthetic construct
  source 1..57: mol_type = other DNA
gacgtgtgctcttccgatctnnnnnnatagttaacagacaaggcctacagacttatt

SEQ ID NO: 1857 - DNA, 55 bp, synthetic construct
  source 1..55: mol_type = other DNA
gacgtgtgctcttccgatctnnnnnnatagttccgagacactggaaggtgaatta

SEQ ID NO: 1858 - DNA, 54 bp, synthetic construct
  source 1..54: mol_type = other DNA
gacgtgtgctcttccgatctnnnnnnatagttcccagtttcttcgcaacatcac

SEQ ID NO: 1859 - DNA, 56 bp, synthetic construct
  source 1..56: mol_type = other DNA
gacgtgtgctcttccgatctnnnnnnatagttaaacataccacccatctgactctc

SEQ ID NO: 1860 - DNA, 54 bp, synthetic construct
  source 1..54: mol_type = other DNA
gacgtgtgctcttccgatctnnnnnnatagttctgtcacgctctgctacaatct

SEQ ID NO: 1861 - DNA, 53 bp, synthetic construct
  source 1..53: mol_type = other DNA
gacgtgtgctcttccgatctnnnnnnatagtttgtctgtctcactgcgttgtt

SEQ ID NO: 1862 - DNA, 56 bp, synthetic construct
  source 1..56: mol_type = other DNA
gacgtgtgctcttccgatctnnnnnnatagttagggaaactgagacaagacaaaga

SEQ ID NO: 1863 - DNA, 57 bp, synthetic construct
  source 1..57: mol_type = other DNA
gacgtgtgctcttccgatctnnnnnnatagttgttagagtacggagcaatcgaagag

SEQ ID NO: 1864 - DNA, 56 bp, synthetic construct
  source 1..56: mol_type = other DNA
gacgtgtgctcttccgatctnnnnnnatagttgaagacagtctggttgtggtagag

SEQ ID NO: 1865 - DNA, 54 bp, synthetic construct
  source 1..54: mol_type = other DNA
gacgtgtgctcttccgatctnnnnnnatagtttcactcaggtcagggcatacta

SEQ ID NO: 1866 - DNA, 56 bp, synthetic construct
  source 1..56: mol_type = other DNA
gacgtgtgctcttccgatctnnnnnnatagttccaggagcaatctctctcaatagg

SEQ ID NO: 1867 - DNA, 56 bp, synthetic construct
  source 1..56: mol_type = other DNA
gacgtgtgctcttccgatctnnnnnnatagtttggtgcatgagaggtaatgagaag

SEQ ID NO: 1868 - DNA, 54 bp, synthetic construct
  source 1..54: mol_type = other DNA
gacgtgtgctcttccgatctnnnnnnatagttcacaggtcacagtcgaagtcaa

SEQ ID NO: 1869 - DNA, 56 bp, synthetic construct
  source 1..56: mol_type = other DNA
gacgtgtgctcttccgatctnnnnnnatagtttctccaccgtaaccacagatagta

SEQ ID NO: 1870 - DNA, 56 bp, synthetic construct
  source 1..56: mol_type = other DNA
gacgtgtgctcttccgatctnnnnnnatagttaagccatctaaagcagtaggaagt

SEQ ID NO: 1871 - DNA, 56 bp, synthetic construct
  source 1..56: mol_type = other DNA
gacgtgtgctcttccgatctnnnnnnatagttagtctcttcatctccctcttctct

SEQ ID NO: 1872 - DNA, 54 bp, synthetic construct
  source 1..54: mol_type = other DNA
gacgtgtgctcttccgatctnnnnnnatagttcagccacaaagcacaccataaa

SEQ ID NO: 1873 - DNA, 55 bp, synthetic construct
  source 1..55: mol_type = other DNA
gacgtgtgctcttccgatctnnnnnnatagttgtatctgtgggcactggagtaag

SEQ ID NO: 1874 - DNA, 54 bp, synthetic construct
  source 1..54: mol_type = other DNA
gacgtgtgctcttccgatctnnnnnnatagtttcagcatcggtgagtgagaaag

SEQ ID NO: 1875 - DNA, 56 bp, synthetic construct
  source 1..56: mol_type = other DNA
gacgtgtgctcttccgatctnnnnnnatagttgtttcctctggtcctggtatgaag

SEQ ID NO: 1876 - DNA, 56 bp, synthetic construct
  source 1..56: mol_type = other DNA
gacgtgtgctcttccgatctnnnnnnatagtttgagaggttcttcaaggtgaactg

SEQ ID NO: 1877 - DNA, 55 bp, synthetic construct
  source 1..55: mol_type = other DNA
gacgtgtgctcttccgatctnnnnnnatagttcttcagtcccagtcgtagcaatc

SEQ ID NO: 1878 - DNA, 56 bp, synthetic construct
  source 1..56: mol_type = other DNA
gacgtgtgctcttccgatctnnnnnnatagttgtatctcctcctgctcgcaataaa

SEQ ID NO: 1879 - DNA, 56 bp, synthetic construct
  source 1..56: mol_type = other DNA
gacgtgtgctcttccgatctnnnnnnatagtttccaacacttctggaggcatatag

SEQ ID NO: 1880 - DNA, 55 bp, synthetic construct
  source 1..55: mol_type = other DNA
gacgtgtgctcttccgatctnnnnnnatagttcaggaattgtggattggagagga

SEQ ID NO: 1881 - DNA, 54 bp, synthetic construct
  source 1..54: mol_type = other DNA
gacgtgtgctcttccgatctnnnnnnatagttgagaaacagcgtctgcactttg

SEQ ID NO: 1882 - DNA, 56 bp, synthetic construct
  source 1..56: mol_type = other DNA
gacgtgtgctcttccgatctnnnnnnatagttgtggtgtatgcaagtatgggaaga

SEQ ID NO: 1883 - DNA, 54 bp, synthetic construct
  source 1..54: mol_type = other DNA
gacgtgtgctcttccgatctnnnnnnatagtttgcaccacctgtcctgatttac

SEQ ID NO: 1884 - DNA, 54 bp, synthetic construct
  source 1..54: mol_type = other DNA
gacgtgtgctcttccgatctnnnnnnatagttccaccacatcttcctgcttagt

SEQ ID NO: 1885 - DNA, 56 bp, synthetic construct
  source 1..56: mol_type = other DNA
gacgtgtgctcttccgatctnnnnnnatagttgtccctgtgatccttcttcatcag

SEQ ID NO: 1886 - DNA, 56 bp, synthetic construct
  source 1..56: mol_type = other DNA
gacgtgtgctcttccgatctnnnnnnatagttagtctctgcgtctatgctcaaatc

SEQ ID NO: 1887 - DNA, 56 bp, synthetic construct
  source 1..56: mol_type = other DNA
gacgtgtgctcttccgatctnnnnnnatagttgcccattagtccaacaaaggaatc

SEQ ID NO: 1888 - DNA, 54 bp, synthetic construct
  source 1..54: mol_type = other DNA
gacgtgtgctcttccgatctnnnnnnatagttgcagcttggccttccaaataag

SEQ ID NO: 1889 - DNA, 54 bp, synthetic construct
  source 1..54: mol_type = other DNA
gacgtgtgctcttccgatctnnnnnnatagttgatgaaaggaggtcgccaaaga

SEQ ID NO: 1890 - DNA, 55 bp, synthetic construct
  source 1..55: mol_type = other DNA
gacgtgtgctcttccgatctnnnnnnatagttgctgaagggaatgaggagatcaa

SEQ ID NO: 1891 - DNA, 56 bp, synthetic construct
  source 1..56: mol_type = other DNA
gacgtgtgctcttccgatctnnnnnnatagttcctgggaggtaggtgcaattatta

SEQ ID NO: 1892 - DNA, 56 bp, synthetic construct
  source 1..56: mol_type = other DNA
gacgtgtgctcttccgatctnnnnnnatagttctgagggaaactggaggtgtaaat

SEQ ID NO: 1893 - DNA, 54 bp, synthetic construct
  source 1..54: mol_type = other DNA
gacgtgtgctcttccgatctnnnnnnatagttttcaggaatgggttccaaggag

SEQ ID NO: 1894 - DNA, 54 bp, synthetic construct
  source 1..54: mol_type = other DNA
gacgtgtgctcttccgatctnnnnnnatagttcaacacagatggccgagaagat

SEQ ID NO: 1895 - DNA, 56 bp, synthetic construct
  source 1..56: mol_type = other DNA
gacgtgtgctcttccgatctnnnnnnatagttgtttctgtcttctccctgcatttg

SEQ ID NO: 1896 - DNA, 53 bp, synthetic construct
  source 1..53: mol_type = other DNA
gacgtgtgctcttccgatctnnnnnnatagttatagccgggtttgagttagca

SEQ ID NO: 1897 - DNA, 56 bp, synthetic construct
  source 1..56: mol_type = other DNA
gacgtgtgctcttccgatctnnnnnnatagtttctttgaccagaactcagccatag

SEQ ID NO: 1898 - DNA, 55 bp, synthetic construct
  source 1..55: mol_type = other DNA
gacgtgtgctcttccgatctnnnnnnatagttcaggaaggtagttgaggcaagaa

SEQ ID NO: 1899 - DNA, 52 bp, synthetic construct
  source 1..52: mol_type = other DNA
gacgtgtgctcttccgatctnnnnnnatagttaggtgtcttggtcgccattt

SEQ ID NO: 1900 - DNA, 57 bp, synthetic construct
  source 1..57: mol_type = other DNA
gacgtgtgctcttccgatctnnnnnnatagttggctacatatggtttgcccaaatag

SEQ ID NO: 1901 - DNA, 55 bp, synthetic construct
  source 1..55: mol_type = other DNA
gacgtgtgctcttccgatctnnnnnnatagttggttggtttctggagtgctacta

SEQ ID NO: 1902 - DNA, 54 bp, synthetic construct
  source 1..54: mol_type = other DNA
gacgtgtgctcttccgatctnnnnnnatagttaatccaaagtcccagccacata

SEQ ID NO: 1903 - DNA, 54 bp, synthetic construct
  source 1..54: mol_type = other DNA
gacgtgtgctcttccgatctnnnnnnatagttttcttcctggagcactcagaac

SEQ ID NO: 1904 - DNA, 56 bp, synthetic construct
  source 1..56: mol_type = other DNA
gacgtgtgctcttccgatctnnnnnnatagttggcactcttccttaactcgtaact

SEQ ID NO: 1905 - DNA, 56 bp, synthetic construct
  source 1..56: mol_type = other DNA
gacgtgtgctcttccgatctnnnnnnatagttcagtccctttcctcgagacataaa

SEQ ID NO: 1906 - DNA, 59 bp, synthetic construct
  source 1..59: mol_type = other DNA
gacgtgtgctcttccgatctnnnnnnatagttgggtgccaaggatgtagaataaataag

SEQ ID NO: 1907 - DNA, 56 bp, synthetic construct
  source 1..56: mol_type = other DNA
gacgtgtgctcttccgatctnnnnnnatagttggtgacagagaggtgagtatgttg

SEQ ID NO: 1908 - DNA, 54 bp, synthetic construct
  source 1..54: mol_type = other DNA
gacgtgtgctcttccgatctnnnnnnatagttgatcttggccactgtggtctta

SEQ ID NO: 1909 - DNA, 55 bp, synthetic construct
  source 1..55: mol_type = other DNA
gacgtgtgctcttccgatctnnnnnnatagttcccggaagcattgcaatcaatag

SEQ ID NO: 1910 - DNA, 56 bp, synthetic construct
  source 1..56: mol_type = other DNA
gacgtgtgctcttccgatctnnnnnnatagttggagcactgattgccaaagaatac

SEQ ID NO: 1911 - DNA, 57 bp, synthetic construct
  source 1..57: mol_type = other DNA
gacgtgtgctcttccgatctnnnnnnatagtttagctaatctgcagctcctcataac

SEQ ID NO: 1912 - DNA, 54 bp, synthetic construct
  source 1..54: mol_type = other DNA
gacgtgtgctcttccgatctnnnnnnatagttgtgagtgctcatcaccctacat

SEQ ID NO: 1913 - DNA, 56 bp, synthetic construct
  source 1..56: mol_type = other DNA
gacgtgtgctcttccgatctnnnnnnatagtttaggatgactggcgtttgttctaa

SEQ ID NO: 1914 - DNA, 54 bp, synthetic construct
  source 1..54: mol_type = other DNA
gacgtgtgctcttccgatctnnnnnnatagtttgcccaggctctcattcttaaa

SEQ ID NO: 1915 - DNA, 55 bp, synthetic construct
  source 1..55: mol_type = other DNA
gacgtgtgctcttccgatctnnnnnnatagttacccgggtaagaatgtgcataaa

SEQ ID NO: 1916 - DNA, 54 bp, synthetic construct
  source 1..54: mol_type = other DNA
gacgtgtgctcttccgatctnnnnnnatagtttctctgcgtctctgtctttgtg

SEQ ID NO: 1917 - DNA, 53 bp, synthetic construct
  source 1..53: mol_type = other DNA
gacgtgtgctcttccgatctnnnnnnatagttaaggtttgggagggtcttgtt

SEQ ID NO: 1918 - DNA, 57 bp, synthetic construct
  source 1..57: mol_type = other DNA
gacgtgtgctcttccgatctnnnnnnatagttgcggcagtactcagtgatgatatag

SEQ ID NO: 1919 - DNA, 52 bp, synthetic construct
  source 1..52: mol_type = other DNA
gacgtgtgctcttccgatctnnnnnnatagttaacagcctgggcaacataga

SEQ ID NO: 1920 - DNA, 53 bp, synthetic construct
  source 1..53: mol_type = other DNA
gacgtgtgctcttccgatctnnnnnnatagtttcggcgtctgctgaacaaata

SEQ ID NO: 1921 - DNA, 55 bp, synthetic construct
  source 1..55: mol_type = other DNA
gacgtgtgctcttccgatctnnnnnnatagttagtaggctctggagaaggagtaa

SEQ ID NO: 1922 - DNA, 55 bp, synthetic construct
  source 1..55: mol_type = other DNA
gacgtgtgctcttccgatctnnnnnnatagttggatatgggactcggcacaataa

SEQ ID NO: 1923 - DNA, 56 bp, synthetic construct
  source 1..56: mol_type = other DNA
gacgtgtgctcttccgatctnnnnnnatagttatcgtgttgtagaccctgtagttg

SEQ ID NO: 1924 - DNA, 55 bp, synthetic construct
  source 1..55: mol_type = other DNA
gacgtgtgctcttccgatctnnnnnnatagttttcctgtggtcgttgtccataaa

SEQ ID NO: 1925 - DNA, 55 bp, synthetic construct
  source 1..55: mol_type = other DNA
gacgtgtgctcttccgatctnnnnnnatagttgacttctcgacaccagttgagtt

SEQ ID NO: 1926 - DNA, 56 bp, synthetic construct
  source 1..56: mol_type = other DNA
gacgtgtgctcttccgatctnnnnnnatagttgatccaccagatcacctacagaac

SEQ ID NO: 1927 - DNA, 55 bp, synthetic construct
  source 1..55: mol_type = other DNA
gacgtgtgctcttccgatctnnnnnnatagtttcgatcccacctgtaccctataa

SEQ ID NO: 1928 - DNA, 58 bp, synthetic construct
  source 1..58: mol_type = other DNA
gacgtgtgctcttccgatctnnnnnnatagttctagaacactagagggccagttaaag

SEQ ID NO: 1929 - DNA, 56 bp, synthetic construct
  source 1..56: mol_type = other DNA
gacgtgtgctcttccgatctnnnnnnatagttaaggagcttgcccagacttaatag

SEQ ID NO: 1930 - DNA, 54 bp, synthetic construct
  source 1..54: mol_type = other DNA
gacgtgtgctcttccgatctnnnnnnatagtttggaggaagagggagggattag

SEQ ID NO: 1931 - DNA, 57 bp, synthetic construct
  source 1..57: mol_type = other DNA
gacgtgtgctcttccgatctnnnnnnatagtttcaggtttctggattaaggactgtt

SEQ ID NO: 1932 - DNA, 54 bp, synthetic construct
  source 1..54: mol_type = other DNA
gacgtgtgctcttccgatctnnnnnnatagttaacgcggtagcagtagaagatg

SEQ ID NO: 1933 - DNA, 55 bp, synthetic construct
  source 1..55: mol_type = other DNA
gacgtgtgctcttccgatctnnnnnnatagttgggatgtctgcagagctgtataa

SEQ ID NO: 1934 - DNA, 56 bp, synthetic construct
  source 1..56: mol_type = other DNA
gacgtgtgctcttccgatctnnnnnnatagttagttacatcgaaggagagccattc

SEQ ID NO: 1935 - DNA, 55 bp, synthetic construct
  source 1..55: mol_type = other DNA
gacgtgtgctcttccgatctnnnnnnatagttcctacgtcaagcagttccctaaa

SEQ ID NO: 1936 - DNA, 56 bp, synthetic construct
  source 1..56: mol_type = other DNA
gacgtgtgctcttccgatctnnnnnnatagttgctgaagataccagccctgaatag

SEQ ID NO: 1937 - DNA, 54 bp, synthetic construct
  source 1..54: mol_type = other DNA
gacgtgtgctcttccgatctnnnnnnatagttcgctttagaaacggctctaggt

SEQ ID NO: 1938 - DNA, 57 bp, synthetic construct
  source 1..57: mol_type = other DNA
gacgtgtgctcttccgatctnnnnnnatagttctgctatcaccacaaccacaataac

SEQ ID NO: 1939 - DNA, 56 bp, synthetic construct
  source 1..56: mol_type = other DNA
gacgtgtgctcttccgatctnnnnnnatagttctgcggtatagcaagtgttgtagt

SEQ ID NO: 1940 - DNA, 55 bp, synthetic construct
  source 1..55: mol_type = other DNA
gacgtgtgctcttccgatctnnnnnnatagttgtgtgggaacctccagatgtaaa

SEQ ID NO: 1941 - DNA, 55 bp, synthetic construct
  source 1..55: mol_type = other DNA
gacgtgtgctcttccgatctnnnnnnatagttagtcatcctcccatcaccaaatc

SEQ ID NO: 1942 - DNA, 56 bp, synthetic construct
  source 1..56: mol_type = other DNA
gacgtgtgctcttccgatctnnnnnnatagttacaaagaatccctagacgccatac

SEQ ID NO: 1943 - DNA, 54 bp, synthetic construct
  source 1..54: mol_type = other DNA
gacgtgtgctcttccgatctnnnnnnatagttgcctcccaaagtgctgagatta

SEQ ID NO: 1944 - DNA, 56 bp, synthetic construct
  source 1..56: mol_type = other DNA
gacgtgtgctcttccgatctnnnnnnatagttgacattcagcaaggccacatttag

SEQ ID NO: 1945 - DNA, 55 bp, synthetic construct
  source 1..55: mol_type = other DNA
gacgtgtgctcttccgatctnnnnnnatagttgagtgggagtggtcttccattac

SEQ ID NO: 1946 - DNA, 55 bp, synthetic construct
  source 1..55: mol_type = other DNA
gacgtgtgctcttccgatctnnnnnnatagttgactttaatctgggccctttgtg

SEQ ID NO: 1947 - DNA, 57 bp, synthetic construct
  source 1..57: mol_type = other DNA
gacgtgtgctcttccgatctnnnnnnatagttggattaccatccctagcctgtattg

SEQ ID NO: 1948 - DNA, 55 bp, synthetic construct
  source 1..55: mol_type = other DNA
gacgtgtgctcttccgatctnnnnnnatagttagcttcaggtcgctgatgtattt

SEQ ID NO: 1949 - DNA, 55 bp, synthetic construct
  source 1..55: mol_type = other DNA
gacgtgtgctcttccgatctnnnnnnatagttctgtggaatgggttccagtaaga

SEQ ID NO: 1950 - DNA, 57 bp, synthetic construct
  source 1..57: mol_type = other DNA
gacgtgtgctcttccgatctnnnnnnatagttctctcccatggtggaaattgaaatg

SEQ ID NO: 1951 - DNA, 55 bp, synthetic construct
  source 1..55: mol_type = other DNA
gacgtgtgctcttccgatctnnnnnnatagttcattcgctgtgttcattggtctc

SEQ ID NO: 1952 - DNA, 55 bp, synthetic construct
  source 1..55: mol_type = other DNA
gacgtgtgctcttccgatctnnnnnnatagttggaatttgctttggaaagggtgt

SEQ ID NO: 1953 - DNA, 56 bp, synthetic construct
  source 1..56: mol_type = other DNA
gacgtgtgctcttccgatctnnnnnnatagttgaggtcctccaaagaagtcagaag

SEQ ID NO: 1954 - DNA, 57 bp, synthetic construct
  source 1..57: mol_type = other DNA
gacgtgtgctcttccgatctnnnnnnatagtttatagggtggagagagttccatacc

SEQ ID NO: 1955 - DNA, 56 bp, synthetic construct
  source 1..56: mol_type = other DNA
gacgtgtgctcttccgatctnnnnnnatagttcctctgtaggtcactgttgctaat

SEQ ID NO: 1956 - DNA, 54 bp, synthetic construct
  source 1..54: mol_type = other DNA
gacgtgtgctcttccgatctnnnnnnatagttctctcagtgctctctgccattt

SEQ ID NO: 1957 - DNA, 53 bp, synthetic construct
  source 1..53: mol_type = other DNA
gacgtgtgctcttccgatctnnnnnnatagtttgatggcagcattgggataca

SEQ ID NO: 1958 - DNA, 54 bp, synthetic construct
  source 1..54: mol_type = other DNA
gacgtgtgctcttccgatctnnnnnnatagttcagtcactccatgtcccaatct

SEQ ID NO: 1959 - DNA, 55 bp, synthetic construct
  source 1..55: mol_type = other DNA
gacgtgtgctcttccgatctnnnnnnatagttgacaaagggtccagcactatcaa

SEQ ID NO: 1960 - DNA, 55 bp, synthetic construct
  source 1..55: mol_type = other DNA
gacgtgtgctcttccgatctnnnnnnatagttcaggtctgtgtggttcaaggtaa

SEQ ID NO: 1961 - DNA, 55 bp, synthetic construct
  source 1..55: mol_type = other DNA
gacgtgtgctcttccgatctnnnnnnatagttcgtggtggaatttcaggacatct

SEQ ID NO: 1962 - DNA, 55 bp, synthetic construct
  source 1..55: mol_type = other DNA
gacgtgtgctcttccgatctnnnnnnatagttcacacgacagtttccttctaggt

SEQ ID NO: 1963 - DNA, 56 bp, synthetic construct
  source 1..56: mol_type = other DNA
gacgtgtgctcttccgatctnnnnnnatagttcagccagggagcttacatacatac

SEQ ID NO: 1964 - DNA, 52 bp, synthetic construct
  source 1..52: mol_type = other DNA
gacgtgtgctcttccgatctnnnnnnatagttaaaggtgcaaggaggatggt

SEQ ID NO: 1965 - DNA, 56 bp, synthetic construct
  source 1..56: mol_type = other DNA
gacgtgtgctcttccgatctnnnnnnatagtttggtcattccgggtaggtttattt

SEQ ID NO: 1966 - DNA, 55 bp, synthetic construct
  source 1..55: mol_type = other DNA
gacgtgtgctcttccgatctnnnnnnatagttcactggacccatctctgctattt

SEQ ID NO: 1967 - DNA, 55 bp, synthetic construct
  source 1..55: mol_type = other DNA
gacgtgtgctcttccgatctnnnnnnatagttaggtcactatgctgtgggtattt

SEQ ID NO: 1968 - DNA, 56 bp, synthetic construct
  source 1..56: mol_type = other DNA
gacgtgtgctcttccgatctnnnnnnatagttctcctcaaacagggaatctgtacc

SEQ ID NO: 1969 - DNA, 57 bp, synthetic construct
  source 1..57: mol_type = other DNA
gacgtgtgctcttccgatctnnnnnnatagttcaagacaaatttccttcccgttctt

SEQ ID NO: 1970 - DNA, 55 bp, synthetic construct
  source 1..55: mol_type = other DNA
gacgtgtgctcttccgatctnnnnnnatagttacttcagagaagctgcagatcaa

SEQ ID NO: 1971 - DNA, 56 bp, synthetic construct
  source 1..56: mol_type = other DNA
gacgtgtgctcttccgatctnnnnnnatagttgaacttgtcttcacaaggcacatc

SEQ ID NO: 1972 - DNA, 52 bp, synthetic construct
  source 1..52: mol_type = other DNA
gacgtgtgctcttccgatctnnnnnnatagtttccttgtccctgccaatcaa

SEQ ID NO: 1973 - DNA, 54 bp, synthetic construct
  source 1..54: mol_type = other DNA
gacgtgtgctcttccgatctnnnnnnatagttggacaaaggtgaaggagaaggt

SEQ ID NO: 1974 - DNA, 56 bp, synthetic construct
  source 1..56: mol_type = other DNA
gacgtgtgctcttccgatctnnnnnnatagttctcagggtgacagataaccagaag

SEQ ID NO: 1975 - DNA, 56 bp, synthetic construct
  source 1..56: mol_type = other DNA
gacgtgtgctcttccgatctnnnnnnatagttgaggtgctggtgttcatacagata

SEQ ID NO: 1976 - DNA, 55 bp, synthetic construct
  source 1..55: mol_type = other DNA
gacgtgtgctcttccgatctnnnnnnatagttcctgtacttcagtcaccagacac

SEQ ID NO: 1977 - DNA, 54 bp, synthetic construct
  source 1..54: mol_type = other DNA
gacgtgtgctcttccgatctnnnnnnatagtttgaagacgaggctggtgtaatc

SEQ ID NO: 1978 - DNA, 54 bp, synthetic construct
  source 1..54: mol_type = other DNA
gacgtgtgctcttccgatctnnnnnnatagttccaggtcctccagctcaataac

SEQ ID NO: 1979 - DNA, 53 bp, synthetic construct
  source 1..53: mol_type = other DNA
gacgtgtgctcttccgatctnnnnnnatagttcagcctggcctcatggataaa

SEQ ID NO: 1980 - DNA, 56 bp, synthetic construct
  source 1..56: mol_type = other DNA
gacgtgtgctcttccgatctnnnnnnatagttctgcgtggctacagataagttaca

SEQ ID NO: 1981 - DNA, 56 bp, synthetic construct
  source 1..56: mol_type = other DNA
gacgtgtgctcttccgatctnnnnnnatagttatgtgctatggtagcggtgattag

SEQ ID NO: 1982 - DNA, 55 bp, synthetic construct
  source 1..55: mol_type = other DNA
gacgtgtgctcttccgatctnnnnnnatagtttaaccagctggagaagtcgagta

SEQ ID NO: 1983 - DNA, 58 bp, synthetic construct
  source 1..58: mol_type = other DNA
gacgtgtgctcttccgatctnnnnnnatagttgaagtccaggagggttgtagataaag

SEQ ID NO: 1984 - DNA, 54 bp, synthetic construct
  source 1..54: mol_type = other DNA
gacgtgtgctcttccgatctnnnnnnatagtttaggcatggttggcagtagaag

SEQ ID NO: 1985 - DNA, 56 bp, synthetic construct
  source 1..56: mol_type = other DNA
gacgtgtgctcttccgatctnnnnnnatagttcctgatggcctcgtagaaagatac

SEQ ID NO: 1986 - DNA, 54 bp, synthetic construct
  source 1..54: mol_type = other DNA
gacgtgtgctcttccgatctnnnnnnatagttagatgcccttctccttgttgag

SEQ ID NO: 1987 - DNA, 54 bp, synthetic construct
  source 1..54: mol_type = other DNA
gacgtgtgctcttccgatctnnnnnnatagttccctgttgctgtagccaaattc

SEQ ID NO: 1988 - DNA, 58 bp, synthetic construct
  source 1..58: mol_type = other DNA
gacgtgtgctcttccgatctnnnnnnatagtttctccctccagttgttggtattattt

SEQ ID NO: 1989 - DNA, 55 bp, synthetic construct
  source 1..55: mol_type = other DNA
gacgtgtgctcttccgatctnnnnnnatagttccgccagtctctgatgaagtaag

SEQ ID NO: 1990 - DNA, 55 bp, synthetic construct
  source 1..55: mol_type = other DNA
gacgtgtgctcttccgatctnnnnnnatagtttggatcactagaatggccaagac

SEQ ID NO: 1991 - DNA, 56 bp, synthetic construct
  source 1..56: mol_type = other DNA
gacgtgtgctcttccgatctnnnnnnatagttgccttagatttcccagcagagtag

SEQ ID NO: 1992 - DNA, 56 bp, synthetic construct
  source 1..56: mol_type = other DNA
gacgtgtgctcttccgatctnnnnnnatagttctaccaaggccacttgaacatcta

SEQ ID NO: 1993 - DNA, 56 bp, synthetic construct
  source 1..56: mol_type = other DNA
gacgtgtgctcttccgatctnnnnnnatagttgctcctttggatagagggaaagaa

SEQ ID NO: 1994 - DNA, 55 bp, synthetic construct
  source 1..55: mol_type = other DNA
gacgtgtgctcttccgatctnnnnnnatagtttgacaggtgggagaagtgaaatc

SEQ ID NO: 1995 - DNA, 55 bp, synthetic construct
  source 1..55: mol_type = other DNA
gacgtgtgctcttccgatctnnnnnnatagttttaagctctgccgtggagtattt

SEQ ID NO: 1996 - DNA, 56 bp, synthetic construct
  source 1..56: mol_type = other DNA
gacgtgtgctcttccgatctnnnnnnatagttaacatcccagctctgtctttctac

SEQ ID NO: 1997 - DNA, 56 bp, synthetic construct
  source 1..56: mol_type = other DNA
gacgtgtgctcttccgatctnnnnnnatagttcctctccctacttccagagctaaa

SEQ ID NO: 1998 - DNA, 57 bp, synthetic construct
  source 1..57: mol_type = other DNA
gacgtgtgctcttccgatctnnnnnnatagttgtgggagtctgtagagtggttaatg

SEQ ID NO: 1999 - DNA, 56 bp, synthetic construct
  source 1..56: mol_type = other DNA
gacgtgtgctcttccgatctnnnnnnatagttggttctcctcacttcccaactaaa

SEQ ID NO: 2000 - DNA, 56 bp, synthetic construct
  source 1..56: mol_type = other DNA
gacgtgtgctcttccgatctnnnnnnatagttctcataactggaagggagaatggg

SEQ ID NO: 2001 - DNA, 56 bp, synthetic construct
  source 1..56: mol_type = other DNA
gacgtgtgctcttccgatctnnnnnnatagttgatcctgtgattaacgagggagtt

SEQ ID NO: 2002 - DNA, 55 bp, synthetic construct
  source 1..55: mol_type = other DNA
gacgtgtgctcttccgatctnnnnnnatagtttttgtctggctccggtaagtaag

SEQ ID NO: 2003 - DNA, 57 bp, synthetic construct
  source 1..57: mol_type = other DNA
gacgtgtgctcttccgatctnnnnnnatagttccaggactgtcttcagatggtttat

SEQ ID NO: 2004 - DNA, 54 bp, synthetic construct
  source 1..54: mol_type = other DNA
gacgtgtgctcttccgatctnnnnnnatagttgcaggaccaaggtaggaaagaa

SEQ ID NO: 2005 - DNA, 56 bp, synthetic construct
  source 1..56: mol_type = other DNA
gacgtgtgctcttccgatctnnnnnnatagttttcctgaccattctgaggcataaa

SEQ ID NO: 2006 - DNA, 56 bp, synthetic construct
  source 1..56: mol_type = other DNA
gacgtgtgctcttccgatctnnnnnnatagttcagagcccacaatggaaagaaatc

SEQ ID NO: 2007 - DNA, 55 bp, synthetic construct
  source 1..55: mol_type = other DNA
gacgtgtgctcttccgatctnnnnnnatagttggataggatggaggaagggaaac

SEQ ID NO: 2008 - DNA, 56 bp, synthetic construct
  source 1..56: mol_type = other DNA
gacgtgtgctcttccgatctnnnnnnatagtttcacggtgcactatattccctaac

SEQ ID NO: 2009 - DNA, 55 bp, synthetic construct
  source 1..55: mol_type = other DNA
gacgtgtgctcttccgatctnnnnnnatagttgaagggcagggacagattcatag

SEQ ID NO: 2010 - DNA, 54 bp, synthetic construct
  source 1..54: mol_type = other DNA
gacgtgtgctcttccgatctnnnnnnatagttaagagccagcagggaatcatag

SEQ ID NO: 2011 - DNA, 56 bp, synthetic construct
  source 1..56: mol_type = other DNA
gacgtgtgctcttccgatctnnnnnnatagttcactctcctcagcaaacacagata

SEQ ID NO: 2012 - DNA, 55 bp, synthetic construct
  source 1..55: mol_type = other DNA
gacgtgtgctcttccgatctnnnnnnatagttctccgtctttcttctccacactt

SEQ ID NO: 2013 - DNA, 56 bp, synthetic construct
  source 1..56: mol_type = other DNA
gacgtgtgctcttccgatctnnnnnnatagttcttcctttgggatgagagcagtag

SEQ ID NO: 2014 - DNA, 56 bp, synthetic construct
  source 1..56: mol_type = other DNA
gacgtgtgctcttccgatctnnnnnnatagttcctaccacagtctccctcctattt

SEQ ID NO: 2015 - DNA, 56 bp, synthetic construct
  source 1..56: mol_type = other DNA
gacgtgtgctcttccgatctnnnnnnatagttgctcccaacagtaacctagagaaa

SEQ ID NO: 2016 - DNA, 54 bp, synthetic construct
  source 1..54: mol_type = other DNA
gacgtgtgctcttccgatctnnnnnnatagttgccaggaatctacccacattct

SEQ ID NO: 2017 - DNA, 54 bp, synthetic construct
  source 1..54: mol_type = other DNA
gacgtgtgctcttccgatctnnnnnnatagttcaggatgaacctggctgactat

SEQ ID NO: 2018 - DNA, 55 bp, synthetic construct
  source 1..55: mol_type = other DNA
gacgtgtgctcttccgatctnnnnnnatagttgatggagtggctcatgcctataa

SEQ ID NO: 2019 - DNA, 57 bp, synthetic construct
  source 1..57: mol_type = other DNA
gacgtgtgctcttccgatctnnnnnnatagttcagtatacagcagaagggtgctaaa

SEQ ID NO: 2020 - DNA, 55 bp, synthetic construct
  source 1..55: mol_type = other DNA
gacgtgtgctcttccgatctnnnnnnatagttttgagcacatagttggacctcag

SEQ ID NO: 2021 - DNA, 58 bp, synthetic construct
  source 1..58: mol_type = other DNA
gacgtgtgctcttccgatctnnnnnnatagttgagtgttggaaagaaccacacataag

SEQ ID NO: 2022 - DNA, 56 bp, synthetic construct
  source 1..56: mol_type = other DNA
gacgtgtgctcttccgatctnnnnnnatagtttcgacctctaaggtgctggtatta

SEQ ID NO: 2023 - DNA, 59 bp, synthetic construct
  source 1..59: mol_type = other DNA
gacgtgtgctcttccgatctnnnnnnatagttctcagtagctcttgggtttcactataa

SEQ ID NO: 2024 - DNA, 56 bp, synthetic construct
  source 1..56: mol_type = other DNA
gacgtgtgctcttccgatctnnnnnnatagttctttacctctgtgtcctcaccaag

SEQ ID NO: 2025 - DNA, 54 bp, synthetic construct
  source 1..54: mol_type = other DNA
gacgtgtgctcttccgatctnnnnnnatagtttacagactgggcgacagagtaa

SEQ ID NO: 2026 - DNA, 55 bp, synthetic construct
  source 1..55: mol_type = other DNA
gacgtgtgctcttccgatctnnnnnnatagttctgcctcctcctccttcctatta

SEQ ID NO: 2027 - DNA, 53 bp, synthetic construct
  source 1..53: mol_type = other DNA
gacgtgtgctcttccgatctnnnnnnatagttgctccaggtcgctgacatatt

SEQ ID NO: 2028 - DNA, 55 bp, synthetic construct
  source 1..55: mol_type = other DNA
gacgtgtgctcttccgatctnnnnnnatagttggcttcggtccacactaagatac

SEQ ID NO: 2029 - DNA, 54 bp, synthetic construct
  source 1..54: mol_type = other DNA
gacgtgtgctcttccgatctnnnnnnatagttgagcccagatttgaaggcagta

SEQ ID NO: 2030 - DNA, 54 bp, synthetic construct
  source 1..54: mol_type = other DNA
gacgtgtgctcttccgatctnnnnnnatagttggcatccatctggtcttggtaa

SEQ ID NO: 2031 - DNA, 56 bp, synthetic construct
  source 1..56: mol_type = other DNA
gacgtgtgctcttccgatctnnnnnnatagttgcaaacaggtctgccattcttaaa

SEQ ID NO: 2032 - DNA, 56 bp, synthetic construct
  source 1..56: mol_type = other DNA
gacgtgtgctcttccgatctnnnnnnatagttgtctggagaaggcatctggaataa

SEQ ID NO: 2033 - DNA, 56 bp, synthetic construct
  source 1..56: mol_type = other DNA
gacgtgtgctcttccgatctnnnnnnatagttaccgagagaatgaagaagtggaaa

SEQ ID NO: 2034 - DNA, 56 bp, synthetic construct
  source 1..56: mol_type = other DNA
gacgtgtgctcttccgatctnnnnnnatagttactcatctaacacctggacacatt

SEQ ID NO: 2035 - DNA, 56 bp, synthetic construct
  source 1..56: mol_type = other DNA
gacgtgtgctcttccgatctnnnnnnatagttgatccactgatgactcagctaacc

SEQ ID NO: 2036 - DNA, 57 bp, synthetic construct
  source 1..57: mol_type = other DNA
gacgtgtgctcttccgatctnnnnnnatagttggtaccatggaggaaggagataaga

SEQ ID NO: 2037 - DNA, 57 bp, synthetic construct
  source 1..57: mol_type = other DNA
gacgtgtgctcttccgatctnnnnnnatagttctcacaggctcacatctctctattt

SEQ ID NO: 2038 - DNA, 56 bp, synthetic construct
  source 1..56: mol_type = other DNA
gacgtgtgctcttccgatctnnnnnnatagttgagggtgggaggcaagtatttaag

SEQ ID NO: 2039 - DNA, 56 bp, synthetic construct
  source 1..56: mol_type = other DNA
gacgtgtgctcttccgatctnnnnnnatagttctcgtagagctcatcatccttgac

SEQ ID NO: 2040 - DNA, 57 bp, synthetic construct
  source 1..57: mol_type = other DNA
gacgtgtgctcttccgatctnnnnnnatagttggtgagatagatggtggtgaagaag

SEQ ID NO: 2041 - DNA, 54 bp, synthetic construct
  source 1..54: mol_type = other DNA
gacgtgtgctcttccgatctnnnnnnatagttgtctgggtctggttgtgaagat

SEQ ID NO: 2042 - DNA, 56 bp, synthetic construct
  source 1..56: mol_type = other DNA
gacgtgtgctcttccgatctnnnnnnatagttgcatctggttcccagaagatatga

SEQ ID NO: 2043 - DNA, 58 bp, synthetic construct
  source 1..58: mol_type = other DNA
gacgtgtgctcttccgatctnnnnnnatagttgtggttactttattggttgggaaagg

SEQ ID NO: 2044 - DNA, 57 bp, synthetic construct
  source 1..57: mol_type = other DNA
gacgtgtgctcttccgatctnnnnnnatagttagttcatttcacttctgcgtcattt

SEQ ID NO: 2045 - DNA, 56 bp, synthetic construct
  source 1..56: mol_type = other DNA
gacgtgtgctcttccgatctnnnnnnatagttctctaaggtctcaacagtcagcag

SEQ ID NO: 2046 - DNA, 56 bp, synthetic construct
  source 1..56: mol_type = other DNA
gacgtgtgctcttccgatctnnnnnnatagttgaggcagacaagacagctatacaa

SEQ ID NO: 2047 - DNA, 55 bp, synthetic construct
  source 1..55: mol_type = other DNA
gacgtgtgctcttccgatctnnnnnnatagttaagccagagttccttcccttaac

SEQ ID NO: 2048 - DNA, 53 bp, synthetic construct
  source 1..53: mol_type = other DNA
gacgtgtgctcttccgatctnnnnnnatagttgtgcacacttaggcagctagt

SEQ ID NO: 2049 - DNA, 57 bp, synthetic construct
  source 1..57: mol_type = other DNA
gacgtgtgctcttccgatctnnnnnnatagttgtaggtatggttgcgctcagtataa

SEQ ID NO: 2050 - DNA, 56 bp, synthetic construct
  source 1..56: mol_type = other DNA
gacgtgtgctcttccgatctnnnnnnatagttcatcattcccttcctgctccttta

SEQ ID NO: 2051 - DNA, 57 bp, synthetic construct
  source 1..57: mol_type = other DNA
gacgtgtgctcttccgatctnnnnnnatagtttccaggaagatgacatcccaataac

SEQ ID NO: 2052 - DNA, 56 bp, synthetic construct
  source 1..56: mol_type = other DNA
gacgtgtgctcttccgatctnnnnnnatagttgaagaccaactcccagttcctaag

SEQ ID NO: 2053 - DNA, 56 bp, synthetic construct
  source 1..56: mol_type = other DNA
gacgtgtgctcttccgatctnnnnnnatagttcgtccagcttagaattccctctac

SEQ ID NO: 2054 - DNA, 55 bp, synthetic construct
  source 1..55: mol_type = other DNA
gacgtgtgctcttccgatctnnnnnnatagttacatcccactccacacacaaata

SEQ ID NO: 2055 - DNA, 55 bp, synthetic construct
  source 1..55: mol_type = other DNA
gacgtgtgctcttccgatctnnnnnnatagttgttcaaggagccagattctctca

SEQ ID NO: 2056 - DNA, 55 bp, synthetic construct
  source 1..55: mol_type = other DNA
gacgtgtgctcttccgatctnnnnnnatagttatccaaagctgaggtgtccatag

SEQ ID NO: 2057 - DNA, 56 bp, synthetic construct
  source 1..56: mol_type = other DNA
gacgtgtgctcttccgatctnnnnnnatagttcaccaaagggttgggtgaattatg

SEQ ID NO: 2058 - DNA, 56 bp, synthetic construct
  source 1..56: mol_type = other DNA
gacgtgtgctcttccgatctnnnnnnatagttcggtagtggttgatgactgttgag

SEQ ID NO: 2059 - DNA, 55 bp, synthetic construct
  source 1..55: mol_type = other DNA
gacgtgtgctcttccgatctnnnnnnatagttcctgtggtgtggtgagatgataa

SEQ ID NO: 2060 - DNA, 54 bp, synthetic construct
  source 1..54: mol_type = other DNA
gacgtgtgctcttccgatctnnnnnnatagttgaatcaaagccaaggccaagag

SEQ ID NO: 2061 - DNA, 56 bp, synthetic construct
  source 1..56: mol_type = other DNA
gacgtgtgctcttccgatctnnnnnnatagttgtaaactttcctgcagccgttaaa

SEQ ID NO: 2062 - DNA, 55 bp, synthetic construct
  source 1..55: mol_type = other DNA
gacgtgtgctcttccgatctnnnnnnatagttggcatagctggccaaacaataaa

SEQ ID NO: 2063 - DNA, 55 bp, synthetic construct
  source 1..55: mol_type = other DNA
gacgtgtgctcttccgatctnnnnnnatagttgtgtcctaagagcaagccacata

SEQ ID NO: 2064 - DNA, 55 bp, synthetic construct
  source 1..55: mol_type = other DNA
gacgtgtgctcttccgatctnnnnnnatagttgggtcttgggtgtgtagaagaag

SEQ ID NO: 2065 - DNA, 54 bp, synthetic construct
  source 1..54: mol_type = other DNA
gacgtgtgctcttccgatctnnnnnnatagttcaggaggcagaggcttcaataa

SEQ ID NO: 2066 - DNA, 55 bp, synthetic construct
  source 1..55: mol_type = other DNA
gacgtgtgctcttccgatctnnnnnnatagttcctggcagaagttccggttatag

SEQ ID NO: 2067 - DNA, 55 bp, synthetic construct
  source 1..55: mol_type = other DNA
gacgtgtgctcttccgatctnnnnnnatagttagcaggtgaaacgtccagaataa

SEQ ID NO: 2068 - DNA, 55 bp, synthetic construct
  source 1..55: mol_type = other DNA
gacgtgtgctcttccgatctnnnnnnatagtttctgggctttgtgatgggatatt

SEQ ID NO: 2069 - DNA, 57 bp, synthetic construct
  source 1..57: mol_type = other DNA
gacgtgtgctcttccgatctnnnnnnatagttggaacactagatggccagtacataa

SEQ ID NO: 2070 - DNA, 56 bp, synthetic construct
  source 1..56: mol_type = other DNA
gacgtgtgctcttccgatctnnnnnnatagtttgtcgttgtcttctttcccataca

SEQ ID NO: 2071 - DNA, 56 bp, synthetic construct
  source 1..56: mol_type = other DNA
gacgtgtgctcttccgatctnnnnnnatagttctagtgctgtggtaggacaatgag

SEQ ID NO: 2072 - DNA, 55 bp, synthetic construct
  source 1..55: mol_type = other DNA
gacgtgtgctcttccgatctnnnnnnatagttggaagaggttgaaggtgacagat

SEQ ID NO: 2073 - DNA, 56 bp, synthetic construct
  source 1..56: mol_type = other DNA
gacgtgtgctcttccgatctnnnnnnatagttcttcataaagtcctggacccactt

SEQ ID NO: 2074 - DNA, 56 bp, synthetic construct
  source 1..56: mol_type = other DNA
gacgtgtgctcttccgatctnnnnnnatagttctgctccatactcgctctgaataa

SEQ ID NO: 2075 - DNA, 56 bp, synthetic construct
  source 1..56: mol_type = other DNA
gacgtgtgctcttccgatctnnnnnnatagttcaagggatttagaggtgacggaag

SEQ ID NO: 2076 - DNA, 52 bp, synthetic construct
  source 1..52: mol_type = other DNA
gacgtgtgctcttccgatctnnnnnnatagttacagctttgcagcccatttc

SEQ ID NO: 2077 - DNA, 57 bp, synthetic construct
  source 1..57: mol_type = other DNA
gacgtgtgctcttccgatctnnnnnnatagttgtaggcttgacttacctgggattag

SEQ ID NO: 2078 - DNA, 56 bp, synthetic construct
  source 1..56: mol_type = other DNA
gacgtgtgctcttccgatctnnnnnnatagttcacctacagatagacgccgataga

SEQ ID NO: 2079 - DNA, 54 bp, synthetic construct
  source 1..54: mol_type = other DNA
gacgtgtgctcttccgatctnnnnnnatagttagagtccgaagtaggtgaggaa

SEQ ID NO: 2080 - DNA, 58 bp, synthetic construct
  source 1..58: mol_type = other DNA
gacgtgtgctcttccgatctnnnnnnatagttacagacactaggaagggattgtaaag

SEQ ID NO: 2081 - DNA, 55 bp, synthetic construct
  source 1..55: mol_type = other DNA
gacgtgtgctcttccgatctnnnnnnatagttgatttctgtgctcggtcctctac

SEQ ID NO: 2082 - DNA, 55 bp, synthetic construct
  source 1..55: mol_type = other DNA
gacgtgtgctcttccgatctnnnnnnatagttgggacacagtcacagcgatataa

SEQ ID NO: 2083 - DNA, 55 bp, synthetic construct
  source 1..55: mol_type = other DNA
gacgtgtgctcttccgatctnnnnnnatagttcctacagcccagagaagacattt

SEQ ID NO: 2084 - DNA, 55 bp, synthetic construct
  source 1..55: mol_type = other DNA
gacgtgtgctcttccgatctnnnnnnatagttgtctcttcatccagctccttgtt

SEQ ID NO: 2085 - DNA, 55 bp, synthetic construct
  source 1..55: mol_type = other DNA
gacgtgtgctcttccgatctnnnnnnatagttgggacagagttcatgtggtagtc

SEQ ID NO: 2086 - DNA, 56 bp, synthetic construct
  source 1..56: mol_type = other DNA
gacgtgtgctcttccgatctnnnnnnatagttacgtagggagagaggaagtgatac

SEQ ID NO: 2087 - DNA, 54 bp, synthetic construct
  source 1..54: mol_type = other DNA
gacgtgtgctcttccgatctnnnnnnatagttcagggcatttcttgggcattag

SEQ ID NO: 2088 - DNA, 58 bp, synthetic construct
  source 1..58: mol_type = other DNA
gacgtgtgctcttccgatctnnnnnnatagttctttacaagattccagggaggaagag

SEQ ID NO: 2089 - DNA, 56 bp, synthetic construct
  source 1..56: mol_type = other DNA
gacgtgtgctcttccgatctnnnnnnatagttctctggagcagaggtcaaagtaaa

SEQ ID NO: 2090 - DNA, 52 bp, synthetic construct
  source 1..52: mol_type = other DNA
gacgtgtgctcttccgatctnnnnnnatagttagcaaagagaggctgggaaa

SEQ ID NO: 2091 - DNA, 55 bp, synthetic construct
  source 1..55: mol_type = other DNA
gacgtgtgctcttccgatctnnnnnnatagttcactaggtgaagccatgaggaaa

SEQ ID NO: 2092 - DNA, 54 bp, synthetic construct
  source 1..54: mol_type = other DNA
gacgtgtgctcttccgatctnnnnnnatagttcacgagaaggatgctcaggaag

SEQ ID NO: 2093 - DNA, 56 bp, synthetic construct
  source 1..56: mol_type = other DNA
gacgtgtgctcttccgatctnnnnnnatagttcttcctccagaggtttgagttctt

SEQ ID NO: 2094 - DNA, 56 bp, synthetic construct
  source 1..56: mol_type = other DNA
gacgtgtgctcttccgatctnnnnnnatagtttgtcggcatgagattaaggcaata

SEQ ID NO: 2095 - DNA, 58 bp, synthetic construct
  source 1..58: mol_type = other DNA
gacgtgtgctcttccgatctnnnnnnatagttcgtaatagttgatgtagaccctgtcc

SEQ ID NO: 2096 - DNA, 56 bp, synthetic construct
  source 1..56: mol_type = other DNA
gacgtgtgctcttccgatctnnnnnnatagttgaccactgatccaaggtcctaaat

SEQ ID NO: 2097 - DNA, 55 bp, synthetic construct
  source 1..55: mol_type = other DNA
gacgtgtgctcttccgatctnnnnnnatagttgtcacatgcagaagcggttaatg

SEQ ID NO: 2098 - DNA, 56 bp, synthetic construct
  source 1..56: mol_type = other DNA
gacgtgtgctcttccgatctnnnnnnatagttgagcgaatgacagagggtttctta

SEQ ID NO: 2099 - DNA, 56 bp, synthetic construct
  source 1..56: mol_type = other DNA
gacgtgtgctcttccgatctnnnnnnatagtttgtcagaaccatttggaggtaaga

SEQ ID NO: 2100 - DNA, 54 bp, synthetic construct
  source 1..54: mol_type = other DNA
gacgtgtgctcttccgatctnnnnnnatagttgtcccaccaagtcccaagataa

SEQ ID NO: 2101 - DNA, 55 bp, synthetic construct
  source 1..55: mol_type = other DNA
gacgtgtgctcttccgatctnnnnnnatagttgggatgaaggaaaggaggaagag

SEQ ID NO: 2102 - DNA, 56 bp, synthetic construct
  source 1..56: mol_type = other DNA
gacgtgtgctcttccgatctnnnnnnatagttgaagaccttcagtggaaggaagag

SEQ ID NO: 2103 - DNA, 56 bp, synthetic construct
  source 1..56: mol_type = other DNA
gacgtgtgctcttccgatctnnnnnnatagttggtccgtaggatgatgacaagaag

SEQ ID NO: 2104 - DNA, 57 bp, synthetic construct
  source 1..57: mol_type = other DNA
gacgtgtgctcttccgatctnnnnnnatagttggaacctatcagattgagggaacag

SEQ ID NO: 2105 - DNA, 55 bp, synthetic construct
  source 1..55: mol_type = other DNA
gacgtgtgctcttccgatctnnnnnnatagttctcttccagatgcaggagaagac

SEQ ID NO: 2106 - DNA, 54 bp, synthetic construct
  source 1..54: mol_type = other DNA
gacgtgtgctcttccgatctnnnnnnatagtttctgtgacatgggtggcataag

SEQ ID NO: 2107 - DNA, 57 bp, synthetic construct
  source 1..57: mol_type = other DNA
gacgtgtgctcttccgatctnnnnnnatagttggcacattacagatgctcaatacac

SEQ ID NO: 2108 - DNA, 59 bp, synthetic construct
  source 1..59: mol_type = other DNA
gacgtgtgctcttccgatctnnnnnnatagttgtgtacatacattcccttaccctaaca

SEQ ID NO: 2109 - DNA, 56 bp, synthetic construct
  source 1..56: mol_type = other DNA
gacgtgtgctcttccgatctnnnnnnatagtttctcttcagaagtgcaagggtaaa

SEQ ID NO: 2110 - DNA, 54 bp, synthetic construct
  source 1..54: mol_type = other DNA
gacgtgtgctcttccgatctnnnnnnatagttgctgattgactgggatgctttg

SEQ ID NO: 2111 - DNA, 55 bp, synthetic construct
  source 1..55: mol_type = other DNA
gacgtgtgctcttccgatctnnnnnnatagtttcactccactcactccaaattcc

SEQ ID NO: 2112 - DNA, 56 bp, synthetic construct
  source 1..56: mol_type = other DNA
gacgtgtgctcttccgatctnnnnnnatagtttgtgtcttatgcctgtgagaaaga

SEQ ID NO: 2113 - DNA, 56 bp, synthetic construct
  source 1..56: mol_type = other DNA
gacgtgtgctcttccgatctnnnnnnatagttagtgtccgaagggaagatgtaaag

SEQ ID NO: 2114 - DNA, 56 bp, synthetic construct
  source 1..56: mol_type = other DNA
gacgtgtgctcttccgatctnnnnnnatagttgaccaggagtcacagatgaagaaa

SEQ ID NO: 2115 - DNA, 55 bp, synthetic construct
  source 1..55: mol_type = other DNA
gacgtgtgctcttccgatctnnnnnnatagttcggaggtccttcttgatggtaag

SEQ ID NO: 2116 - DNA, 56 bp, synthetic construct
  source 1..56: mol_type = other DNA
gacgtgtgctcttccgatctnnnnnnatagttcagggtcagaacatccactaagaa

SEQ ID NO: 2117 - DNA, 55 bp, synthetic construct
  source 1..55: mol_type = other DNA
gacgtgtgctcttccgatctnnnnnnatagttctccctgagagaaaccaccatac

SEQ ID NO: 2118 - DNA, 54 bp, synthetic construct
  source 1..54: mol_type = other DNA
gacgtgtgctcttccgatctnnnnnnatagttttcccaaaggagccagtcttag

SEQ ID NO: 2119 - DNA, 56 bp, synthetic construct
  source 1..56: mol_type = other DNA
gacgtgtgctcttccgatctnnnnnnatagttcgagagttgacactccgtcttaaa

SEQ ID NO: 2120 - DNA, 53 bp, synthetic construct
  source 1..53: mol_type = other DNA
gacgtgtgctcttccgatctnnnnnnatagtttgagtcttggcctggtcattt

SEQ ID NO: 2121 - DNA, 56 bp, synthetic construct
  source 1..56: mol_type = other DNA
gacgtgtgctcttccgatctnnnnnnatagttccaaactccttcccatcctgatac

SEQ ID NO: 2122 - DNA, 57 bp, synthetic construct
  source 1..57: mol_type = other DNA
gacgtgtgctcttccgatctnnnnnnatagttggtgaaacagaacagatcctgaagt

SEQ ID NO: 2123 - DNA, 56 bp, synthetic construct
  source 1..56: mol_type = other DNA
gacgtgtgctcttccgatctnnnnnnatagttcctgtgagcacactccagatatac

SEQ ID NO: 2124 - DNA, 56 bp, synthetic construct
  source 1..56: mol_type = other DNA
gacgtgtgctcttccgatctnnnnnnatagttccagggaacttcttaggcttagtg

SEQ ID NO: 2125 - DNA, 54 bp, synthetic construct
  source 1..54: mol_type = other DNA
gacgtgtgctcttccgatctnnnnnnatagtttgggcacttgctccatagtaaa

SEQ ID NO: 2126 - DNA, 55 bp, synthetic construct
  source 1..55: mol_type = other DNA
gacgtgtgctcttccgatctnnnnnnatagttcgtagcggtggatggagaaatag

SEQ ID NO: 2127 - DNA, 56 bp, synthetic construct
  source 1..56: mol_type = other DNA
gacgtgtgctcttccgatctnnnnnnatagttcaagagttggactacgcaccttag

SEQ ID NO: 2128 - DNA, 56 bp, synthetic construct
  source 1..56: mol_type = other DNA
gacgtgtgctcttccgatctnnnnnnatagttggagccagttcttcaatagtaccc

SEQ ID NO: 2129 - DNA, 55 bp, synthetic construct
  source 1..55: mol_type = other DNA
gacgtgtgctcttccgatctnnnnnnatagttcgtgtgattgtcagccgtaaaga

SEQ ID NO: 2130 - DNA, 56 bp, synthetic construct
  source 1..56: mol_type = other DNA
gacgtgtgctcttccgatctnnnnnnatagttgcatctccggactcaagtgaaata

SEQ ID NO: 2131 - DNA, 56 bp, synthetic construct
  source 1..56: mol_type = other DNA
gacgtgtgctcttccgatctnnnnnnatagttcctgcttgcctagaggaataagag

SEQ ID NO: 2132 - DNA, 57 bp, synthetic construct
  source 1..57: mol_type = other DNA
gacgtgtgctcttccgatctnnnnnnatagttcatgggagcaactggtagtagtaaa

SEQ ID NO: 2133 - DNA, 56 bp, synthetic construct
  source 1..56: mol_type = other DNA
gacgtgtgctcttccgatctnnnnnnatagttgcaggaagtagaagacagcgataa

SEQ ID NO: 2134 - DNA, 56 bp, synthetic construct
  source 1..56: mol_type = other DNA
gacgtgtgctcttccgatctnnnnnnatagttgggtggagtgtgacataagaacaa

SEQ ID NO: 2135 - DNA, 57 bp, synthetic construct
  source 1..57: mol_type = other DNA
gacgtgtgctcttccgatctnnnnnnatagttgtcccatgagtgcttctaggtattc

SEQ ID NO: 2136 - DNA, 56 bp, synthetic construct
  source 1..56: mol_type = other DNA
gacgtgtgctcttccgatctnnnnnnatagtttctatggtgacgttgcaggtattt

SEQ ID NO: 2137 - DNA, 54 bp, synthetic construct
  source 1..54: mol_type = other DNA
gacgtgtgctcttccgatctnnnnnnatagttgaaactcacaggaggtgttgga

SEQ ID NO: 2138 - DNA, 56 bp, synthetic construct
  source 1..56: mol_type = other DNA
gacgtgtgctcttccgatctnnnnnnatagtttgtttctccacagtagttcccatc

SEQ ID NO: 2139 - DNA, 54 bp, synthetic construct
  source 1..54: mol_type = other DNA
gacgtgtgctcttccgatctnnnnnnatagttcgatcaatccagggtgctactt

SEQ ID NO: 2140 - DNA, 54 bp, synthetic construct
  source 1..54: mol_type = other DNA
gacgtgtgctcttccgatctnnnnnnatagttcccatggagccaacagagataa

SEQ ID NO: 2141 - DNA, 55 bp, synthetic construct
  source 1..55: mol_type = other DNA
gacgtgtgctcttccgatctnnnnnnatagttccgacaccacctgatatgctaaa

SEQ ID NO: 2142 - DNA, 56 bp, synthetic construct
  source 1..56: mol_type = other DNA
gacgtgtgctcttccgatctnnnnnnatagttcctgtagtgacccacgatgttaat

SEQ ID NO: 2143 - DNA, 55 bp, synthetic construct
  source 1..55: mol_type = other DNA
gacgtgtgctcttccgatctnnnnnnatagttcaccttaacctctccagcatcaa

SEQ ID NO: 2144 - DNA, 54 bp, synthetic construct
  source 1..54: mol_type = other DNA
gacgtgtgctcttccgatctnnnnnnatagttgaagaacctgcacggtcactat

SEQ ID NO: 2145 - DNA, 55 bp, synthetic construct
  source 1..55: mol_type = other DNA
gacgtgtgctcttccgatctnnnnnnatagttagacagccaaggcaatgagatag

SEQ ID NO: 2146 - DNA, 55 bp, synthetic construct
  source 1..55: mol_type = other DNA
gacgtgtgctcttccgatctnnnnnnatagttctgaatcccgaagacccatcatt

SEQ ID NO: 2147 - DNA, 54 bp, synthetic construct
  source 1..54: mol_type = other DNA
gacgtgtgctcttccgatctnnnnnnatagttcctctcattcaaccgcctagtt

SEQ ID NO: 2148 - DNA, 55 bp, synthetic construct
  source 1..55: mol_type = other DNA
gacgtgtgctcttccgatctnnnnnnatagttagagcagggataagggaagaatg

SEQ ID NO: 2149 - DNA, 56 bp, synthetic construct
  source 1..56: mol_type = other DNA
gacgtgtgctcttccgatctnnnnnnatagttggcacaggagataggctagaatag

SEQ ID NO: 2150 - DNA, 53 bp, synthetic construct
  source 1..53: mol_type = other DNA
gacgtgtgctcttccgatctnnnnnnatagttggacacctgccacctgataaa

SEQ ID NO: 2151 - DNA, 57 bp, synthetic construct
  source 1..57: mol_type = other DNA
gacgtgtgctcttccgatctnnnnnnatagttcctccctcaacagcacactaataaa

SEQ ID NO: 2152 - DNA, 54 bp, synthetic construct
  source 1..54: mol_type = other DNA
gacgtgtgctcttccgatctnnnnnnatagttgagcatacactccctggaaaca

SEQ ID NO: 2153 - DNA, 54 bp, synthetic construct
  source 1..54: mol_type = other DNA
gacgtgtgctcttccgatctnnnnnnatagttctggtagagttcggtgcagaat

SEQ ID NO: 2154 - DNA, 56 bp, synthetic construct
  source 1..56: mol_type = other DNA
gacgtgtgctcttccgatctnnnnnnatagttctggagtacagtggcacaatcata
